(19) United States
(12) Patent Application Publication
(10) Pub. No.: US 2022/0056455 A1
(43) Pub. Date: Feb. 24, 2022

(54) COMPOSITIONS AND METHODS FOR THE TREATMENT OF KCNT1 RELATED DISORDERS

(71) Applicant: Praxis Precision Medicines, Inc., Cambridge, MA (US)

(72) Inventors: Steven Petrou, Victoria (AU); Michael Kristopher Mathieu Kahlig, Redwood City, CA (US); Kiran Reddy, Boston, MA (US)

(21) Appl. No.: 17/415,164

(22) PCT Filed: Dec. 20, 2019
(86) PCT No.: PCT/US2019/067976

§ 371 Date: Jun. 17, 2021

Related U.S. Application Data
(60) Provisional application No. 62/782,877, filed on Dec. 20, 2018.
(60) Provisional application No. 62/862,328, filed on Jun. 17, 2019.
(60) Provisional application No. 62/884,567, filed on Aug. 8, 2019.

(51) Int. Cl. C12N 15/113

(52) U.S. Cl. CPC C12N 15/1138; C12N 2310/11; C12N 2310/322; C12N 2310/345; C12N 2310/3231; C12N 2310/341; C12N 2310/346; C12N 2310/315

(57) ABSTRACT

The present disclosure features useful compositions and methods to treat KCNT1 related disorders, e.g., in a subject in need thereof.

### CROSS REFERENCE

[0001] This application claims the benefit of and priority to U.S. Provisional Patent Application No. 62/782,877 filed Dec. 20, 2018; U.S. Provisional Patent Application No. 62/862,328 filed on Jun. 17, 2019; and U.S. Provisional Patent Application No. 62/884,567 filed on Aug. 8, 2019, the entire disclosure of each of which is hereby incorporated by reference in its entirety for all purposes.

### SEQUENCE LISTING

[0002] The instant application contains a Sequence Listing which has been submitted electronically in ASCII format and is hereby incorporated by reference in its entirety. Said ASCII copy, created on Dec. 19, 2019, is named PRX-039WO_SL.txt and is 1,005,552 bytes in size.

### BACKGROUND

[0003] KCNT1 encodes a sodium-activated potassium channel (intracellular sodium-activated channel, subfamily T member 1) that is expressed in the central nervous system. Also known as Slack and K_{Na}1.1, KCNT1 is a member of the Slo-type family of potassium channel genes and can co-assemble with other Slo channel subunits. These channels can mediate a sodium-sensitive potassium current (I_{KNa}), which is triggered by an influx of sodium channels ions through sodium channels or neurotransmitter receptors. It is thought that this delayed outward current is involved in regulating neuronal excitability.

[0004] Mutations in KCNT1 (e.g., gain-of-function mutations) have been associated with particular forms of epilepsy, including epilepsy of infancy with migrating focal seizures (EIMFS), autosomal dominant nocturnal frontal lobe epilepsy (ADNFLE), West syndrome, infantile spasms, epileptic encephalopathy, focal epilepsy, Ohtahara syndrome, developmental epileptic encephalopathy, and Lennox Gastaut syndrome. Currently, no cures exist for these diseases. Accordingly, new compositions and methods of treating these diseases are needed.

### SUMMARY

[0005] In one aspect, provided herein are compounds comprising an oligonucleotide comprising a nucleobase sequence at least 90% complementary to at least 10 contiguous nucleobases of a transcript comprising a sequence at least 90% identity to SEQ ID NO: 3526, or a contiguous 15 to 50 nucleobase portion of SEQ ID NO: 3526, wherein at least one nucleoside linkage of the nucleobase sequence is a modified internucleoside linkage. In some embodiments, the present disclosure provides compounds comprising an oligonucleotide comprising a nucleobase sequence 100% complementary to at least 10 contiguous nucleobases of a transcript comprising a sequence at least 90% identity to SEQ ID NO: 3526, or a contiguous 15 to 50 nucleobase portion of SEQ ID NO: 3526, wherein at least one nucleoside linkage of the nucleobase sequence is a modified internucleoside linkage.

[0006] In another aspect, provided herein are oligonucleotides comprising a nucleobase sequence at least 90% complementary to at least 10 contiguous nucleobases of a transcript comprising a sequence at least 90% identity to SEQ ID NO: 3526, or a contiguous 15 to 50 nucleobase portion of SEQ ID NO: 3526, wherein at least one nucleoside linkage of the nucleobase sequence is a modified internucleoside linkage.

[0007] In some embodiments, the oligonucleotide comprises at least a contiguous 10 nucleobase sequence that shares 90% identity with an equal length portion of any one of SEQ ID NOs: 1-3525. In some embodiments, the present disclosure provides an oligonucleotide comprising at least a contiguous 10 nucleobase sequence that shares 100% identity with an equal length portion of any one of SEQ ID NOs: 1-3525.

[0008] In some embodiments, the oligonucleotide comprises at least a contiguous 11, 12, 13, 14, 15, 16, or 17 nucleobase sequence that shares at least 90% identity with an equal length portion of any one of SEQ ID NOs: 1-3525. In some embodiments, the present disclosure provides an oligonucleotide comprising at least a contiguous 11, 12, 13, 14, 15, 16, or 17 nucleobase sequence that shares 100% identity with an equal length portion of any one of SEQ ID NOs: 1-3525.

[0009] In some embodiments, the oligonucleotide comprises at least a contiguous 10 nucleobase sequence that shares 90% identity with an equal length portion of any one of SEQ ID NOs: 1-116. In some embodiments, the present disclosure provides an oligonucleotide comprising at least a contiguous 10 nucleobase sequence that shares 100% identity with an equal length portion of any one of SEQ ID NOs: 1-116.

[0010] In some embodiments, the oligonucleotide comprises at least a contiguous 10 nucleobase sequence that shares at least 90% identity with an equal length portion of any one of SEQ ID NOs: 1, 4, 5, 6, 8, 10, 12, 13, 15, 17, 28, 29, 62, 625-649, 1046, 1071, 1195-1224, 1388, 1496-1567, 2591-2631, or 3395-3525, wherein at least one nucleoside linkage of the nucleobase sequence is a modified internucleoside linkage. In some embodiments, the oligonucleotide comprises at least a contiguous 10 nucleobase sequence that shares at least 90% identity with an equal length portion of any one of SEQ ID NOs: 4, 1046, 1071, 1388, 1551, 1546, or 2595, wherein at least one nucleoside linkage of the nucleobase sequence is a modified internucleoside linkage. In some embodiments, the present disclosure provides an oligonucleotide comprising at least a contiguous 10 nucleobase sequence that shares 100% identity with an equal length portion of any one of SEQ ID NOs: 1, 4, 5, 6, 8, 10, 12, 13, 15, 17, 28, 29, 62, 625-649, 1046, 1071, 1195-1224, 1388, 1496-1567, 2591-2631, or 3395-3525, wherein at least one nucleoside linkage of the nucleobase sequence is a modified internucleoside linkage.

[0011] In some embodiments, the oligonucleotide comprises at least a contiguous 11, 12, 13, 14, 15, 16, or 17 nucleobase sequence that shares at least 90% identity with an equal length portion of any one of SEQ ID NOs: 1, 4, 5, 6, 8, 10, 12, 13, 15, 17, 28, 29, 62, 625-649, 1046, 1071, 1195-1224, 1388, 1496-1567, 2591-2631, or 3395-3525, wherein at least one nucleoside linkage of the nucleobase sequence is a modified internucleoside linkage. In some embodiments, the oligonucleotide comprises at least a contiguous 11, 12, 13, 14, 15, 16, or 17 nucleobase sequence that shares at least 90% identity with an equal length portion of any one of SEQ ID NOs: 4, 1046, 1071, 1388, 1551, 1546, or 2595, wherein at least one nucleoside linkage of the nucleobase sequence is a modified internucleoside linkage. In some embodiments, the present disclosure provides an oligonucleotide comprising at least a contiguous 11, 12, 13, 14, 15, 16, or 17 nucleobase sequence that shares 100% identity with an equal length portion of any one of SEQ ID NOs: 1, 4, 5, 6, 8, 10, 12, 13, 15, 17, 28, 29, 62, 625-649, 1046, 1071, 1195-1224, 1388, 1496-1567, 2591-2631, or 3395-3525, wherein at least one nucleoside linkage of the nucleobase sequence is a modified internucleoside linkage.

[0012] In another aspect, provided herein are compounds comprising an oligonucleotide comprising at least 10 contiguous nucleobases that share 90% identity to an equal length portion of any one of SEQ ID 1, 4, 5, 6, 8, 10, 12, 13, 15, 17, 28, 29, 62, 625-649, 1046, 1071, 1195-1224, 1388, 1496-1567, 2591-2631, or 3395-3525, wherein at least one nucleoside linkage of the nucleobase sequence is a modified internucleoside linkage. In some embodiments, provided herein are compounds comprising an oligonucleotide comprising at least 10 contiguous nucleobases that share 90% identity to an equal length portion of any one of SEQ ID 1, 4, 5, 6, 8, 10, 12, 13, 15, 17, 28, 29, 62, 625-649, 1046, 1071, 1195-1224, 1388, 1496-1567, 2591-2631, or 3395-3525, wherein at least one nucleoside linkage of the nucleobase sequence is a modified internucleoside linkage. In some embodiments, the oligonucleotide comprises at least 10 contiguous nucleobases that share 90% identity to an equal length portion of any one of SEQ ID NOs: 4, 1046, 1071, 1388, 1551, 1546, or 2595, wherein at least one nucleoside linkage of the nucleobase sequence is a modified internucleoside linkage.

[0013] In another aspect, provided herein are oligonucleotides comprising at least 10 contiguous nucleobases that share 90% identity to an equal length portion of any one of SEQ ID NOs: 1, 4, 5, 6, 8, 10, 12, 13, 15, 17, 28, 29, 62, 625-649, 1046, 1071, 1195-1224, 1388, 1496-1567, 2591-2631, or 3395-3525, wherein at least one nucleoside linkage of the nucleobase sequence is a modified internucleoside linkage. In some embodiments, the oligonucleotide comprises at least 10 contiguous nucleobases that share 90% identity to an equal length portion of any one of SEQ ID NOs: 4, 1046, 1071, 1388, 1551, 1546, or 2595, wherein at least one nucleoside linkage of the nucleobase sequence is a modified internucleoside linkage.

[0014] In some embodiments, the oligonucleotide comprises at least 11, 12, 13, 14, 15, 16, 17, 18, or 19 contiguous nucleobases of any one of SEQ ID NOs: 1, 4, 5, 6, 8, 10, 12, 13, 15, 17, 28, 29, 62, 625-649, 1046, 1071, 1195-1224, 1388, 1496-1567, 2591-2631, or 3395-3525, wherein at least one nucleoside linkage of the nucleobase sequence is a modified internucleoside linkage. In some embodiments, the oligonucleotide comprises at least 11, 12, 13, 14, 15, 16, 17, 18, or 19 contiguous nucleobases of any one of SEQ ID NOs: 4, 1046, 1071, 1388, 1551, 1546, or 2595, wherein at least one nucleoside linkage of the nucleobase sequence is a modified internucleoside linkage.

[0015] In another aspect, provided herein are compounds comprising an oligonucleotide comprising at least 10 contiguous nucleobases which is at least 90% complementary to an equal length portion of nucleobases within a 10 nucleobase range of any one of positions 374, 661, 765, 837, 1347, 1629, 2879, 3008, 3168, 1760, 1752, 1795, 1775, 665-680, 1340-1370, 1740-1815, or 3110-3171 of SEQ ID NO: 3526, wherein at least one nucleoside linkage of the nucleobase sequence is a modified internucleoside linkage.

[0016] In another aspect, provided herein are oligonucleotides comprising at least 10 contiguous nucleobases which is at least 90% complementary to an equal length portion of nucleobases within a 10 nucleobase range of positions 374, 661, 765, 837, 1347, 1629, 2879, 3008, 3168, 1760, 1752, 1795, 1775, 665-680, 1340-1370, 1740-1815, or 3110-3171 of SEQ ID NO: 3526, wherein at least one nucleoside linkage of the nucleobase sequence is a modified internucleoside linkage.

[0017] In some embodiments, the oligonucleotide comprises at least 10 contiguous nucleobases that are complementary to an equal length portion of nucleobases within any one of positions 655-680, 1340-137, 1740-1815, or 3110-3175 of SEQ ID NO: 3526, wherein at least one nucleoside linkage of the nucleobase sequence is a modified internucleoside linkage.

[0018] In some embodiments, the oligonucleotide comprises at least 10 contiguous nucleobases that are complementary to an equal length portion of nucleobases within any one of positions 655-665, 660-670, 665-675, or 670-680 of SEQ ID NO: 3526, wherein at least one nucleoside linkage of the nucleobase sequence is a modified internucleoside linkage.

[0019] In some embodiments, the oligonucleotide comprises at least 10 contiguous nucleobases that are complementary to an equal length portion of nucleobases within any one of positions 1340-1350, 1345-1355, 1350-1360, 1355-1365, or 1360-1370 of SEQ ID NO: 3526, wherein at least one nucleoside linkage of the nucleobase sequence is a modified internucleoside linkage. In some embodiments, the oligonucleotide comprises at least 10 contiguous nucleobases that are complementary to an equal length portion of nucleobases within any one of positions 1740-1750, 1745-1755, 1750-1760, 1755-1765, 1760-1770, 1765-1775, 1770-1780, 1775-1785, 1780-1790, 1785-1795, 1790-1800, 1795-1805, 1800-1810, or 1805-1815 of SEQ ID NO: 3526, wherein at least one nucleoside linkage of the nucleobase sequence is a modified internucleoside linkage.

[0020] In some embodiments, the oligonucleotide comprises at least 10 contiguous nucleobases that are complementary to an equal length portion of nucleobases within any one of positions 3110-3120, 3115-3125, 3120-3130, 3125-3135, 3130-3140, 3135-3145, 3140-3150, 3145-3155, 3150-3160, 3155-3165, 3160-3170, 3165-3175, 3170-3180 of SEQ ID NO: 3526, wherein at least one nucleoside linkage of the nucleobase sequence is a modified internucleoside linkage.

[0021] In some embodiments, the oligonucleotide comprises at least 11, 12, 13, 14, 15, 16, 17, 18, or 19 contiguous nucleobases complementary to an equal length portion of nucleobases within any one of positions 374, 661, 765, 837, 1347, 1629, 2879, 3008, 3168, 1760, 1752, 1795, 1775, 655-680, 1340-1370, 1740-1815, or 3110-3171 of SEQ ID NO: 3526, wherein at least one nucleoside linkage of the nucleobase sequence is a modified internucleoside linkage.

[0022] In some embodiments, the oligonucleotide comprises at least 11, 12, 13, 14, 15, 16, 17, 18, or 19 contiguous nucleobases complementary to an equal length portion of nucleobases within any one of 655-680, 1340-137, 1740-1815, or 3110-3175 of SEQ ID NO: 3526, wherein at least one nucleoside linkage of the nucleobase sequence is a modified internucleoside linkage.

[0023] In some embodiments, the oligonucleotide is between 12 and 40 nucleobases in length.

[0024] In some embodiments, the oligonucleotide comprises: a gap segment comprising one or more of linked deoxyribonucleosides, 2′-Fluoro Arabino Nucleic Acids (FANA), and Fluoro Cyclohexenyl nucleic acid (F-CeNA); a 5′ wing segment comprising linked nucleosides; and a 3′ wing segment comprising linked nucleosides; wherein the gap segment comprises a region of at least 8 contiguous nucleobases having at least 80% identity to an equal length portion of any one of SEQ ID NOs: 1-3525 positioned between the 5′ wing segment and the 3′ wing segment; wherein the 5′ wing segment and the 3′ wing segment each comprises at least two linked nucleosides; and wherein at least one nucleoside of each wing segment comprises a modified sugar.

[0025] In some embodiments, the oligonucleotide comprises; a gap segment comprising one or more of linked deoxyribonucleosides, 2′-Fluoro Arabino Nucleic Acids (FANA), and Fluoro Cyclohexenyl nucleic acid (F-CeNA); a 5′ wing segment comprising linked nucleosides; and a 3′ wing segment comprising linked nucleosides; wherein the gap segment comprises a region of at least 8 contiguous nucleobases having at least 80% identity to an equal length portion of any one of SEQ ID NOs: 1-3525 positioned between the 5′ wing segment and the 3′ wing segment; wherein the 5′ wing segment and the 3′ wing segment each comprises at least two linked nucleosides; and wherein at least one nucleoside of each wing segment comprises a modified sugar.

[0026] In some embodiments, the oligonucleotide comprises at least 13, 14, 15, 16, 17, 18, 19, or 20 linked nucleosides.

[0027] In some embodiments, at least one nucleoside linkage of the nucleobase sequence is selected from the group consisting of a phosphodiester linkage, a phosphorothioate linkage, a 2′-alkoxy linkage, an alkyl phosphate linkage, alkyl phosphonate linkage, a phosphorodithioate linkage, a phosphotriester linkage, an alkylphosphonate linkage, a methylphosphonate linkage, a dimethylphosphonate linkage, an aminoalkylphosphotriester linkage, an alkylene phosphonate linkage, a phosphinate linkage, a phosphoramidate linkage, a phosphorodiamidate linkage, an aminoalkylphosphoramidate linkage, a thiophosphoramidate linkage, a thionoalkylphosphonate linkage, a thionoalkylphosphotriester linkage, a thiophosphate linkage, a selenophosphate linkage, and a boranophosphate linkage.

[0028] In some embodiments, the at least two linked nucleosides of the 5′ wing segment are linked through a phosphodiester internucleoside linkage and wherein the at least two linked nucleosides of the 3′ wing segment are linked through a phosphodiester internucleoside linkage, and wherein at least one of the internucleoside linkages of the gap segment is a modified internucleoside linkage.

[0029] In some embodiments, at least two, three, or four internucleoside linkages of the nucleobase sequence are phosphodiester internucleoside linkages.

[0030] In some embodiments, at least one, two, three, or four internucleoside linkages between nucleoside bases of the gap segment are phosphodiester internucleoside linkages.

[0031] In some embodiments, at least two internucleoside linkages of the nucleobase sequence is a modified internucleoside linkage.

[0032] In some embodiments, the modified internucleoside linkage of the nucleobase sequence is a phosphorothioate linkage.

[0033] In some embodiments, all internucleoside linkages of the nucleobase sequence are phosphorothioate linkages.

[0034] In some embodiments, the at least two linked nucleosides of the 5′ wing segment are linked through a modified internucleoside linkage.

[0035] In some embodiments, the at least two linked nucleosides of the 3′ wing segment are linked through a modified internucleoside linkage.

[0036] In some embodiments, the at least two linked nucleosides of the 5′ wing segment are linked through a phosphorothioate internucleoside linkage and wherein the at least two linked nucleosides of the 3′ wing segment are linked through a phosphorothioate internucleoside linkage, and wherein at least one of the internucleoside linkages of the gap segment is a modified internucleoside linkage.

[0037] In some embodiments, at least two, three, or four internucleoside linkages of the nucleobase sequence are phosphorothioate internucleoside linkages.

[0038] In some embodiments, at least one, two, three, or four internucleoside linkages between nucleoside bases of the gap segment are phosphorothioate internucleoside linkages.

[0039] In some embodiments, the phosphorothioate internucleoside linkage is in one of a Rp configuration or a Sp configuration. In some embodiments the phosphorothioate linkages are mixed stero-enriched (e.g., Sp-Rp-Sp or Rp-Sp-Rp) phosphorothioate linkages.

[0040] In some embodiments, the oligonucleotide comprises at least one modified nucleobase.

[0041] In some embodiments, the at least one modified nucleobase is 5′-methylcytosine, pseudouridine, or 5-methoxyuridine.

[0042] In some embodiments, the oligonucleotide comprises at least one modified sugar moiety.

[0043] In some embodiments, the at least one modified sugar is a bicyclic sugar. In some embodiments, the bicyclic sugar comprises a 4′-CH(R)—O-2′ bridge wherein R is, independently, H, C₁-C₁₂ alkyl, or a protecting group. In some embodiments, R is methyl. In some embodiments, R is H.

[0044] In some embodiments, the modified sugar moiety is one of a 2′-OMe modified sugar moiety, bicyclic sugar moiety, 2′-O-methoxyethyl (MOE), 2′-deoxy-2′-fluoro nucleoside, 2′-fluoro-β-D-arabinonucleoside, locked nucleic acid (LNA), constrained ethyl 2′-4′-bridged nucleic acid (cEt), S-cEt, tcDNA, hexitol nucleic acids (HNA), and tricyclic analog (e.g., tcDNA). In some embodiments, the modified sugar moiety is constrained ethyl 2′-4′-bridged nucleic acid (cEt), for example, S-cEt.

[0045] In some embodiments, the oligonucleotide comprises one or more 2′-O-methoxyethyl nucleosides that are linked through phosphorothioate internucleoside linkages.

[0046] In some embodiments, the oligonucleotide comprises three contiguous nucleoside bases that are linked through phosphorothioate internucleoside linkages at the 5′ end and three contiguous nucleoside bases that are linked through phosphorothioate internucleoside linkages at the 3′ end.

[0047] In some embodiments, the oligonucleotide comprises five contiguous nucleoside bases that are linked through phosphorothioate internucleoside linkages.

[0048] In some embodiments, each of the five contiguous nucleoside bases are 2′-O-methoxyethyl nucleosides. In some embodiments, each of the nucleoside bases of the oligonucleotide are 2′-O-methoxyethyl nucleosides. In some embodiments, the gap segment comprises one or more 2′-O-methoxyethyl nucleosides.

[0049] In some embodiments, the gap segment comprises phosphorothioate internucleoside linkages, wherein the 5′ wing segment comprises two contiguous nucleoside bases that are linked through phosphodiester internucleoside linkages, and wherein the 3′ wing segment comprises two contiguous nucleoside bases that are linked through phosphodiester internucleoside linkages.

[0050] In some embodiments, five contiguous nucleoside bases in the gap segment are linked through phosphorothioate internucleoside linkages, wherein the 5′ wing segment comprises at least one phosphorothioate internucleoside linkage, and wherein the 3′ wing segment comprises at least one phosphorothioate internucleoside linkage.

[0051] In some embodiments, the oligonucleotide comprises one or more chiral centers and/or double bonds. In some embodiments, the oligonucleotide exist as stereoisomers selected from geometric isomers, enantiomers, and diastereomers.

[0052] In some embodiments, the oligonucleotide comprises sugar modifications in any of the following patterns: eeeee-d10-eeeee, d20, eeeee-d12-eeeee, eeeee-d8-eeeee, and eekk-d8-kkeee, wherein e=2′-O-methoxyethyl nucleoside; d=a 2′-deoxynucleoside; k=a locked nucleic acid (LNA), constrained methoxyethyl (cMOE) nucleoside, constrained ethyl (cET) nucleoside, or peptide nucleic acid (PNA).

[0053] In some embodiments, the oligonucleotide comprises internucleoside linkages in any of the following patterns: sssssssssssssssssss; sssssssssssssssssssss; sooosssssssssooss; and soosssssssssooss; wherein s=a phosphorothioate linkage, and o=a phosphodiester linkage.

[0054] In some embodiments, the oligonucleotide comprises sugar modification and internucleoside linkage combinations, respectively, in any of the following patterns: a) d20 and sssssssssssssssssss; b) eeeee-d10-eeeee and sssssssssssssssssss; c) eeeee-d12-eeeee and sssssssssssssssssssss; d) eeeee-d8-eeeee and sooosssssssssooss; and e) eekk-d8-kkeee and soosssssssssooss.

[0055] In some embodiments, the oligonucleotide comprises a modified cytosine.

[0056] In some embodiments, the modified cytosine is 5-methyl-dexocytosine (5-methyl-dC).

[0057] In some embodiments, the oligonucleotide comprises sugar modification and internucleoside linkage combinations eeeee-d10-eeeee and sssssssssssssssssss, and the cytosines are modified as 5-methyl-dC.

[0058] In some embodiments, the oligonucleotide comprises sugar modification and internucleoside linkage combinations, respectively, in any of the following patterns: a) d20 and sssssssssssssssssss; b) eeeee-d12-eeeee and sssssssssssssssssssss; c) eeeee-d8-eeeee and sooosssssssssooss; and d) eekk-d8-kkeee and soosssssssssooss; and the any cytosine in the oligonucleotide is an unmodified cytosine.

[0059] In some embodiments, the oligonucleotide is complementary to a nucleobase sequence of a target region of a target nucleic acid sequence, wherein the nucleobase sequence of the target region of the target nucleic acid differs from the nucleobase sequence of at least one non-target nucleic acid sequence by 1-3 differentiating nucleobases, and wherein the non-target nucleic acid comprises a sequence of SEQ ID NO: 3526. In some embodiments, the 1-3 differentiating nucleobases comprises a single-nucleotide polymorphism (SNP). In some embodiments, the SNP present in the target region is a SNP compared to an equal length portion of SEQ ID NO: 3526. In some embodiments, the single nucleotide polymorphism is selected from the group consisting of: rs397515403, rs397515402, rs587777264, rs397515404, rs866242631, rs886043455, rs397515407, and rs397515406. In some embodiments, the single nucleotide polymorphism is selected from the group consisting of: a C to a G at position 1112 of the sequence shown in SEQ ID NO: 3526, a C to a T at position 2845 of the sequence shown in SEQ ID NO: 3526, and a G to a T at position 885 of the sequence shown in SEQ ID NO: 3526.

[0060] In another aspect, provided herein are pharmaceutical compositions comprising the compound or oligonucleotide of any one of the above claims and a pharmaceutically acceptable carrier or excipient.

[0061] In some embodiments, the pharmaceutical composition is suitable for topical, intrathecal, intracisternal, parenteral, oral, pulmonary, intratracheal, intranasal, transdermal, rectal, buccal, sublingual, vaginal, or intraduodenal administration.

[0062] In another aspect, provided herein are compositions comprising the compound or oligonucleotide of any one of the above claims and a lipid nanoparticle, a polyplex nanoparticle, a lipoplex nanoparticle, or a liposome.

[0063] In another aspect, provided herein are methods of reducing a level and/or activity of KCNT1 in a cell of a subject having a KCNT1 related disorder, the method comprising contacting the cell with the compound as described herein, the oligonucleotide as described herein or the pharmaceutical composition as described herein in an amount and for a duration sufficient to reduce the level and/or activity of KCNT1 in the cell.

[0064] In some embodiments, the cell is a cell of the central nervous system.

[0065] In another aspect, provided herein are methods of treating a neurological disease in a subject in need thereof, the method comprising administering to the patient an inhibitor of a transcript, wherein the transcript shares at least 90% identity with SEQ ID NO: 3526.

[0066] In some embodiments, the inhibitor is the oligonucleotide as described herein or the pharmaceutical composition as described herein.

[0067] In another aspect, provided herein are methods of treating, preventing, or delaying the progression of a KCNT1 related disorder in a subject in need thereof, the method comprising administering to the subject the compound as described herein, the oligonucleotide as described herein or the pharmaceutical composition as described herein in an amount and for a duration sufficient to treat, prevent, or delay the progression of the KCNT1 related disorder.

[0068] In some embodiments, the KCNT1 related disorder is selected from the group consisting of epilepsy of infancy with migrating focal seizures, autosomal dominant nocturnal frontal lobe epilepsy, West syndrome, infantile spasms, epileptic encephalopathy, focal epilepsy, Ohtahara syndrome, developmental epileptic encephalopathy, and Lennox Gastaut syndrome.

[0069] In some embodiments, the subject has a gain-of-function mutation in KCNT1.

[0070] In some embodiments, the gain-of-function mutation is selected from the group consisting of V271F, L274I, G288S, F346L, R398Q, R428Q, R474H, F502V, M516V, K629N, I760M, Y796H, E893K, M896I, M896K, P924L, R928C, F932I, A934T, A966T, H257D, R262Q, Q270E, V340M, C377S, P409S, L437F, R474C, A477T, R565H, K629E, G652V, I760F, Q906H, R933G, A934T, R950Q, R961H, R1106Q, K1154Q, R474Q, Y1903C, H469L, M896R, K946E, and R950L.

[0071] In some embodiments, the gain-of-function mutation is G288S, R398Q, R428Q, R928C, or A934T.

[0072] In some embodiments, the method reduces one or more symptoms of the KCNT1 related disorder.

[0073] In some embodiments, the one or more symptoms of the KCNT1 related disorder is selected from the group consisting of prolonged seizures, frequent seizures, behavioral and developmental delays, movement and balance issues, orthopedic conditions, delayed language and speech issues, growth and nutrition issues, sleeping difficulties, chronic infection, sensory integration disorder, disruption of the autonomic nervous system, and sweating.

[0074] In some embodiments, the oligonucleotide or pharmaceutical composition is administered topically, parenterally, intrathecally, intracisternally, orally, rectally, buccally, sublingually, vaginally, pulmonarily, intratracheally, intranasally, transdermally, or intraduodenally.

[0075] In some embodiments, the patient is a human.

[0076] In another aspect, provided herein are compounds comprising a modified oligonucleotide of 18-22 linked nucleosides in length and having at least 85% sequence complementarity to an equal length portion of H. sapiens KCNT1 and M. musculus KCNT1 transcript.

[0077] In another aspect, provided herein are compounds comprising a modified oligonucleotide of 18-22 linked nucleosides in length and having at least 85% sequence complementarity to an equal length portion of H. sapiens KCNT1 and M. fascicularis KCNT1 transcript.

[0078] In another aspect, provided herein are compounds comprising a modified oligonucleotide of 18-22 linked nucleosides in length and having at least 85% sequence complementarity to an equal length portion of H. sapiens KCNT1, M. musculus KCNT1, and/or M. fascicularis KCNT1 transcript.

[0079] In some embodiments, the oligonucleotide comprises a GC content from 40% to 70%.

[0080] In some embodiments, the oligonucleotide comprises no more than 2 mismatches to H. sapiens KCNT1 transcript. In some embodiments, the oligonucleotide comprises at least 3 mismatches to any non KCNT1 transcript.

[0081] In some embodiments, the oligonucleotide lacks a GGGG tetrad.

[0082] In some embodiments, the oligonucleotide is not any one of SEQ ID NOs: 3512-3525.

[0083] In some embodiments, the oligonucleotide is not any one of SEQ ID NOs: 3512-3525.

### BRIEF DESCRIPTION OF THE DRAWINGS

[0084] These and other features, aspects, and advantages of the present invention will become better understood with regard to the following description, and accompanying drawings, where:

[0085] FIG. 1 is a plot demonstrating percentage knockdown of hKCNT1 in response to antisense oligonucleotide treatments.

### DETAILED DESCRIPTION

### Definitions

[0086] For convenience, the meaning of some terms and phrases used in the specification, examples, and appended claims are provided below. Unless stated otherwise, or implicit from context, the following terms and phrases include the meanings provided below. The definitions are provided to aid in describing particular embodiments, and are not intended to limit the claimed technology, because the scope of the technology is limited only by the claims. Unless otherwise defined, all technical and scientific terms used herein have the same meaning as commonly understood by one of ordinary skill in the art to which this technology belongs. If there is an apparent discrepancy between the usage of a term in the art and its definition provided herein, the definition provided within the specification shall prevail.

[0087] In this application, unless otherwise clear from context, (i) the term “a” may be understood to mean “at least one”; (ii) the term “or” may be understood to mean “and/or”; and (iii) the terms “including” and “comprising” may be understood to encompass itemized components or steps whether presented by themselves or together with one or more additional components or steps.

[0088] As used herein, the terms “about” and “approximately” refer to a value that is within 10% above or below the value being described. For example, the term “about 5 nM” indicates a range of from 4.5 to 5.5 nM.

[0089] The term “at least” prior to a number or series of numbers is understood to include the number adjacent to the term “at least”, and all subsequent numbers or integers that could logically be included, as clear from context. For example, the number of nucleotides in a nucleic acid molecule must be an integer. For example, “at least 18 nucleotides of a 21-nucleotide nucleic acid molecule” means that 18, 19, 20, or 21 nucleotides have the indicated property. When at least is present before a series of numbers or a range, it is understood that “at least” can modify each of the numbers in the series or range.

[0090] As used herein, “no more than” or “less than” is understood as the value adjacent to the phrase and logical lower values or integers, as logical from context, to zero. For example, an oligonucleotide with “no more than 3 mismatches to a target sequence” has 3, 2, 1, or 0 mismatches to a target sequence. When “no more than” is present before a series of numbers or a range, it is understood that “no more than” can modify each of the numbers in the series or range.

[0091] As used herein, the term “administration” refers to the administration of a composition (e.g., a compound or a preparation that includes a compound as described herein) to a subject or system. Administration to an animal subject (e.g., to a human) may be by any appropriate route, such as one described herein.

[0092] As used herein, a “combination therapy” or “administered in combination” means that two (or more) different agents or treatments are administered to a subject as part of a defined treatment regimen for a particular disease or condition. The treatment regimen defines the doses and periodicity of administration of each agent such that the effects of the separate agents on the subject overlap. In some embodiments, the delivery of the two or more agents is simultaneous or concurrent and the agents may be co-formulated. In some embodiments, the two or more agents are not co-formulated and are administered in a sequential manner as part of a prescribed regimen. In some embodiments, administration of two or more agents or treatments in combination is such that the reduction in a symptom, or other parameter related to the disorder is greater than what would be observed with one agent or treatment delivered alone or in the absence of the other. The effect of the two treatments can be partially additive, wholly additive, or greater than additive (e.g., synergistic). Sequential or substantially simultaneous administration of each therapeutic agent can be effected by any appropriate route including, but not limited to, oral routes, intravenous routes, intramuscular routes, and direct absorption through mucous membrane tissues. The therapeutic agents can be administered by the same route or by different routes. For example, a first therapeutic agent of the combination may be administered by intravenous injection while a second therapeutic agent of the combination may be administered orally.

[0093] As used herein, the term “KCNT1” refers potassium sodium-activated channel subfamily T member 1, having an amino acid sequence from any vertebrate or mammalian source, including, but not limited to, human, bovine, chicken, rodent, mouse, rat, porcine, ovine, primate, monkey, and guinea pig, unless specified otherwise. The term also refers to fragments and variants of native KCNT1 that maintain at least one in vivo or in vitro activity of a native KCNT1. The term encompasses full-length unprocessed precursor forms of KCNT1 as well as mature forms resulting from post-translational cleavage of the signal peptide. KCNT1 is encoded by the KCNT1 gene. The nucleic acid sequence of an exemplary Homo sapien (human) KCNT1 gene is set forth in NCBI Reference No. NG_033070.1. The nucleic acid sequence of an exemplary Homo sapien (human) KCNT1 transcript is set forth in NCBI Reference No. NM_020822.2 and NM_001272003.1. The term “KCNT1” also refers to natural variants of the wild-type KCNT1 protein, such as proteins having at least 85% identity (e.g., 85%, 86%, 87%, 88%, 89%, 90%, 91%, 92%, 93%, 94%, 95%, 96%, 97%, 98%, 99%, 99.9% identity, or more) to the amino acid sequence of wild-type human KCNT1. The nucleic acid sequence of an exemplary Mus musculus (mouse) KCNT1 transcript is set forth in NCBI Reference No. NM_175462.4 and NM_001145403.2, and NM_01302351.1. The nucleic acid sequence of an exemplary Macaca fascicularis (cyno) KCNT1 transcript is set forth in NCBI Reference No. XM_015436456.1.

[0094] The term “KCNT1” as used herein also refers to a particular polypeptide expressed in a cell by naturally occurring DNA sequence variations of the KCNT1 gene, such as a single nucleotide polymorphism in the KCNT1 gene. Numerous SNPs within the KCNT1 transcript have been identified (see, e.g., Table 1).

[0095] As used herein, “target sequence” refers to a contiguous portion of the nucleotide sequence of an mRNA molecule formed during the transcription of a KCNT1 gene, including mRNA that is a product of RNA processing of a primary transcription product. In one embodiment, the target portion of the sequence will be at least long enough to serve as a substrate for oligonucleotide-directed (e.g., antisense oligonucleotide (ASO)-directed) cleavage at or near that portion of the nucleotide sequence of an mRNA molecule formed during the transcription of a KCNT1 gene. The target sequence may be, for example, from about 9-36 nucleotides in length, e.g., about 15-30 nucleotides in length, e.g., about 18-22 nucleotides in length. For example, the target sequence can be from about 15-30 nucleotides, 15-29, 15-28, 15-27, 15-26, 15-25, 15-24, 15-23, 15-22, 15-21, 15-20, 15-19, 15-18, 15-17, 18-30, 18-29, 18-28, 18-27, 18-26, 18-25, 18-24, 18-23, 18-22, 18-21, 18-20, 19-30, 19-29, 19-28, 19-27, 19-26, 19-25, 19-24, 19-23, 19-22, 19-21, 19-20, 20-30, 20-29, 20-28, 20-27, 20-26, 20-25, 20-24, 20-23, 20-22, 20-21, 21-30, 21-29, 21-28, 21-27, 21-26, 21-25, 21-24, 21-23, or 21-22 nucleotides in length. Ranges and lengths intermediate to the above recited ranges and lengths are also contemplated to be part of the invention.

[0096] “G,” “C,” “A,” “T,” and “U” each generally stand for a naturally-occurring nucleotide that contains guanine, cytosine, adenine, thymidine, and uracil as a base, respectively. However, it will be understood that the term “nucleotide” can also refer to an alternative nucleotide, as further detailed below, or a surrogate replacement moiety. The skilled person is well aware that guanine, cytosine, adenine, and uracil can be replaced by other moieties without substantially altering the base pairing properties of an oligonucleotide comprising a nucleotide bearing such replacement moiety. For example, without limitation, a nucleotide comprising inosine as its base can base pair with nucleotides containing adenine, cytosine, or uracil. Hence, nucleotides containing uracil, guanine, or adenine can be replaced in the nucleotide sequences of oligonucleotides featured in the invention by a nucleotide containing, for example, inosine. In another example, adenine and cytosine anywhere in the oligonucleotide can be replaced with guanine and uracil, respectively to form G-U Wobble base pairing with the target mRNA. Sequences containing such replacement moieties are suitable for the compositions and methods featured in the invention.

[0097] The terms “nucleobase” and “base” include the purine (e.g. adenine and guanine) and pyrimidine (e.g. uracil, thymine, and cytosine) moiety present in nucleosides and nucleotides which form hydrogen bonds in nucleic acid hybridization. In the context of the present invention, the term nucleobase also encompasses alternative nucleobases which may differ from naturally-occurring nucleobases, but are functional during nucleic acid hybridization. In this context “nucleobase” refers to both naturally occurring nucleobases such as adenine, guanine, cytosine, thymidine, uracil, xanthine, and hypoxanthine, as well as alternative nucleobases. Such variants are for example described in Hirao et al (2012) Accounts of Chemical Research vol 45 page 2055 and Bergstrom (2009) Current Protocols in Nucleic Acid Chemistry Suppl. 37 1.4.1.

[0098] The term “nucleoside” refers to a monomeric unit of an oligonucleotide or a polynucleotide having a nucleobase and a sugar moiety. A nucleoside may include those that are naturally-occurring as well as alternative nucleosides, such as those described herein. The nucleobase of a nucleoside may be a naturally-occurring nucleobase or an alternative nucleobase. Similarly, the sugar moiety of a nucleoside may be a naturally-occurring sugar or an alternative sugar.

[0099] The term “alternative nucleoside” or “modified nucleoside” refers to a nucleoside having an alternative sugar or an alternative nucleobase, such as those described herein.

[0100] In a some embodiments the nucleobase moiety is modified by changing the purine or pyrimidine into a modified purine or pyrimidine, such as substituted purine or substituted pyrimidine, such as an “alternative nucleobase” selected from isocytosine, pseudoisocytosine, 5-methyl cytosine, 5-thiozolo-cytosine, 5-propynyl-cytosine, 5-propynyl-uridine, 5-bromouridine 5-thiazolo-uridine, 2-thio-uridine, pseudouridine, 1-methylpseudouridine, 5-methoxyuridine, 2′-thio-thymine, inosine, diaminopurine, 6-aminopurine, 2-aminopurine, 2,6-diaminopurine, and 2-chloro-6-aminopurine.

[0101] The nucleobase moieties may be indicated by the letter code for each corresponding nucleobase, e.g. A, T, G, C, or U, wherein each letter may optionally include alternative nucleobases of equivalent function. In some embodiments, e.g., for gapmers, 5-methyl cytosine LNA nucleosides may be used.

[0102] A “sugar” or “sugar moiety” includes naturally occurring sugars having a furanose ring. A sugar also includes an “alternative sugar,” defined as a structure that is capable of replacing the furanose ring of a nucleoside. In certain embodiments, alternative sugars are non-furanose (or 4′-substituted furanose) rings or ring systems or open systems. Such structures include simple changes relative to the natural furanose ring, such as a six-membered ring, or may be more complicated as is the case with the non-ring system used in peptide nucleic acid. Alternative sugars may also include sugar surrogates wherein the furanose ring has been replaced with another ring system such as, for example, a morpholino or hexitol ring system. Sugar moieties useful in the preparation of oligonucleotides having motifs include, without limitation, β-D-ribose, β-D-2′-deoxyribose, substituted sugars (such as 2′, 5′ and bis substituted sugars), 4′-S-sugars (such as 4′-S-ribose, 4′-S-2′-deoxyribose and 4′-S-2′-substituted ribose), bicyclic alternative sugars (such as the 2′-O—CH₂-4′ or 2′-O—(CH₂)₂-4′ bridged ribose derived bicyclic sugars) and sugar surrogates (such as when the ribose ring has been replaced with a morpholino or a hexitol ring system). The type of heterocyclic base and internucleoside linkage used at each position is variable and is not a factor in determining the motif. In most nucleosides having an alternative sugar moiety, the heterocyclic nucleobase is generally maintained to permit hybridization.

[0103] A “nucleotide,” as used herein, refers to a monomeric unit of an oligonucleotide or polynucleotide that comprises a nucleoside and an internucleosidic linkage. The internucleosidic linkage may or may not include a phosphate linkage. Similarly, “linked nucleosides” may or may not be linked by phosphate linkages. Many “alternative internucleosidic linkages” are known in the art, including, but not limited to, phosphate, phosphorothioate, and boranophosphate linkages. Alternative nucleosides include bicyclic nucleosides (BNAs) (e.g., locked nucleosides (LNAs) and constrained ethyl (cEt) nucleosides), peptide nucleosides (PNAs), phosphotriesters, phosphorothionates, phosphoramidates, and other variants of the phosphate backbone of native nucleoside, including those described herein.

[0104] An “alternative nucleotide,” as used herein, refers to a nucleotide having an alternative nucleoside or an alternative sugar, and an internucleoside linkage, which may include alternative nucleoside linkages.

[0105] The terms “oligonucleotide” and “polynucleotide” as used herein are defined as it is generally understood by the skilled person as a molecule comprising two or more covalently linked nucleosides. Such covalently bound nucleosides may also be referred to as nucleic acid molecules or oligomers. Oligonucleotides are commonly made in the laboratory by solid-phase chemical synthesis followed by purification. When referring to a sequence of the oligonucleotide, reference is made to the sequence or order of nucleobase moieties, or modifications thereof, of the covalently linked nucleotides or nucleosides. The oligonucleotide of the invention may be man-made, is chemically synthesized, and is typically purified or isolated. Oligonucleotide is also intended to include (i) compounds that have one or more furanose moieties that are replaced by furanose derivatives or by any structure, cyclic or acyclic, that may be used as a point of covalent attachment for the base moiety, (ii) compounds that have one or more phosphodiester linkages that are either modified, as in the case of phosphoramidate or phosphorothioate linkages, or completely replaced by a suitable linking moiety as in the case of formacetal or riboacetal linkages, and/or (iii) compounds that have one or more linked furanose-phosphodiester linkage moieties replaced by any structure, cyclic or acyclic, that may be used as a point of covalent attachment for the base moiety. The oligonucleotide of the invention may comprise one or more alternative nucleosides or nucleotides (e.g., including those described herein). It is also understood that oligonucleotide includes compositions lacking a sugar moiety or nucleobase but is still capable of forming a pairing with or hybridizing to a target sequence.

[0106] “Oligonucleotide” refers to a short polynucleotide (e.g., of 100 or fewer linked nucleosides).

[0107] “Chimeric” oligonucleotides or “chimeras,” in the context of this invention, are oligonucleotides which contain two or more chemically distinct regions, each made up of at least one monomer unit, i.e., a nucleotide or nucleoside in the case of an oligonucleotide. Chimeric oligonucleotides also include “gapmers.”

[0108] The oligonucleotide may be of any length that permits specific degradation of a desired target RNA through an RNase H-mediated pathway, and may range from about 10-30 base pairs in length, e.g., about 15-30 base pairs in length or about 18-22 (e.g., 18-20) base pairs in length, for example, about 10, 11, 12, 13, 14, 15, 16, 17, 18, 19, 20, 21, 22, 23, 24, 25, 26, 27, 28, 29, or 30 base pairs in length, such as about 15-30, 15-29, 15-28, 15-27, 15-26, 15-25, 15-24, 15-23, 15-22, 15-21, 15-20, 15-19, 15-18, 15-17, 18-30, 18-29, 18-28, 18-27, 18-26, 18-25, 18-24, 18-23, 18-22, 18-21, 18-20, 19-30, 19-29, 19-28, 19-27, 19-26, 19-25, 19-24, 19-23, 19-22, 19-21, 19-20, 20-30, 20-29, 20-28, 20-27, 20-26, 20-25, 20-24, 20-23, 20-22, 20-21, 21-30, 21-29, 21-28, 21-27, 21-26, 21-25, 21-24, 21-23, or 21-22 base pairs in length. Ranges and lengths intermediate to the above recited ranges and lengths are also contemplated to be part of the invention.

[0109] As used herein, the term “oligonucleotide comprising a nucleobase sequence” refers to an oligonucleotide comprising a chain of nucleotides or nucleosides that is described by the sequence referred to using the standard nucleotide nomenclature.

[0110] The term “contiguous nucleobase region” refers to the region of the oligonucleotide which is complementary to the target nucleic acid. The term may be used interchangeably herein with the term “contiguous nucleotide sequence” or “contiguous nucleobase sequence.” In some embodiments all the nucleotides of the oligonucleotide are present in the contiguous nucleotide or nucleoside region. In some embodiments the oligonucleotide comprises the contiguous nucleotide region and may optionally comprise further nucleotide(s) or nucleoside(s), for example a nucleotide linker region which may be used to attach a functional group to the contiguous nucleotide sequence. The nucleotide linker region may or may not be complementary to the target nucleic acid. In some embodiments the internucleoside linkages present between the nucleotides of the contiguous nucleotide region are all phosphorothioate internucleoside linkages. In some embodiments, the contiguous nucleotide region comprises one or more sugar-modified nucleosides.

[0111] The term “gapmer” as used herein refers to an oligonucleotide which comprises a region of RNase H recruiting oligonucleotides (gap) which is flanked 5′ and 3′ by regions which comprise one or more affinity enhancing alternative nucleosides (wings or flanks). Various gapmer designs are described herein. Headmers and tailmers are oligonucleotides capable of recruiting RNase H where one of the wings is missing, e.g., only one of the ends of the oligonucleotide comprises affinity enhancing alternative nucleosides. For headmers, the 3′ wing is missing (e.g., the 5′ wing comprises affinity enhancing alternative nucleosides) and for tailmers the 5′ wing is missing (e.g., the 3′ wing comprises affinity enhancing alternative nucleosides). A “mixed wing gapmer” refers to a gapmer wherein the wing regions comprise at least one alternative nucleoside, such as at least one DNA nucleoside or at least one 2′ substituted alternative nucleoside, such as, for example, 2′-O-alkyl-RNA, 2′-O-methyl-RNA, 2′-alkoxy-RNA, 2′-O-methoxyethyl-RNA (MOE), 2′-amino-DNA, 2′-Fluoro-RNA, 2′-F-ANA nucleoside(s), or bicyclic nucleosides (e.g., locked nucleosides or constrained ethyl (cEt) nucleosides). In some embodiments the mixed wing gapmer has one wing which comprises alternative nucleosides (e.g., 5′ or 3′) and the other wing (3′ or 5′ respectfully) comprises 2′ substituted alternative nucleoside(s).

[0112] The term “linker” or “linking group” is a connection between two atoms that links one chemical group or segment of interest to another chemical group or segment of interest via one or more covalent bonds. Conjugate moieties can be attached to the oligonucleotide directly or through a linking moiety (e.g., linker or tether). Linkers serve to covalently connect a third region, e.g., a conjugate moiety to an oligonucleotide (e.g., the termini of region A or C). In some embodiments of the invention the conjugate or oligonucleotide conjugate of the invention may optionally, comprise a linker region which is positioned between the oligonucleotide and the conjugate moiety. In some embodiments, the linker between the conjugate and oligonucleotide is biocleavable. Phosphodiester containing biocleavable linkers are described in more detail in International Publication No. WO 2014/076195 (herein incorporated by reference).

[0113] As used herein, and unless otherwise indicated, the term “complementary,” when used to describe a first nucleotide or nucleoside sequence in relation to a second nucleotide or nucleoside sequence, refers to the ability of an oligonucleotide or polynucleotide comprising the first nucleotide or nucleoside sequence to hybridize and form a duplex structure under certain conditions with an oligonucleotide or polynucleotide comprising the second nucleotide sequence, as will be understood by the skilled person. Such conditions can, for example, be stringent conditions, where stringent conditions can include: 400 mM NaCl, 40 mM PIPES pH 6.4, 1 mM EDTA, 50° C., or 70° C., for 12-16 hours followed by washing (see, e.g., “Molecular Cloning: A Laboratory Manual, Sambrook, et al. (1989) Cold Spring Harbor Laboratory Press). Other conditions, such as physiologically relevant conditions as can be encountered inside an organism, can apply. The skilled person will be able to determine the set of conditions most appropriate for a test of complementarity of two sequences in accordance with the ultimate application of the hybridized nucleotides or nucleosides.

[0114] “Complementary” sequences, as used herein, can also include, or be formed entirely from, non-Watson-Crick base pairs and/or base pairs formed from non-natural and alternative nucleotides or nucleosides, in so far as the above requirements with respect to their ability to hybridize are fulfilled. Such non-Watson-Crick base pairs include, but are not limited to, G:U Wobble or Hoogstein base pairing. Complementary sequences between an oligonucleotide and a target sequence as described herein, include base-pairing of the oligonucleotide or polynucleotide comprising a first nucleotide or nucleoside sequence to an oligonucleotide or polynucleotide comprising a second nucleotide or nucleoside sequence over the entire length of one or both nucleotide or nucleoside sequences. Such sequences can be referred to as “fully complementary” with respect to each other herein. However, where a first sequence is referred to as “substantially complementary” with respect to a second sequence herein, the two sequences can be fully complementary, or they can form one or more, but generally not more than 5, 4, 3 or 2 mismatched base pairs upon hybridization for a duplex up to 30 base pairs, while retaining the ability to hybridize under the conditions most relevant to their ultimate application, e.g., inhibition of gene expression via an RNase H-mediated pathway. “Substantially complementary” can also refer to a polynucleotide that is substantially complementary to a contiguous portion of the mRNA of interest (e.g., an mRNA encoding KCNT1). For example, a polynucleotide is complementary to at least a part of a KCNT1 mRNA if the sequence is substantially complementary to a non-interrupted portion of an mRNA encoding KCNT1.

[0115] As used herein, the term “region of complementarity” refers to the region on the oligonucleotide that is substantially complementary to all or a portion of a gene, primary transcript, a sequence (e.g., a target sequence, e.g., a KCNT1 mRNA nucleotide sequence or a KCNT1 mRNA transcript variant), or processed mRNA, so as to interfere with expression of the endogenous gene (e.g., KCNT1). Where the region of complementarity is not fully complementary to the target sequence, the mismatches can be in the internal or terminal regions of the molecule. Generally, the most tolerated mismatches are in the terminal regions, e.g., within 5, 4, 3, or 2 nucleotides of the 5′- and/or 3′-terminus of the oligonucleotide.

[0116] As used herein, an “agent that reduces the level and/or activity of KCNT1” refers to any polynucleotide agent (e.g., an oligonucleotide, e.g., an ASO) that reduces the level of or inhibits expression of KCNT1 in a cell or subject. The phrase “inhibiting expression of KCNT1,” as used herein, includes inhibition of expression of any KCNT1 gene (such as, e.g., a mouse KCNT1 gene, a rat KCNT1 gene, a monkey KCNT1 gene, or a human KCNT1 gene) as well as variants or mutants of a KCNT1 gene that encode a KCNT1 protein. Thus, the KCNT1 gene may be a wild-type KCNT1 gene, a mutant KCNT1 gene, or a transgenic KCNT1 gene in the context of a genetically manipulated cell, group of cells, or organism.

[0117] By “reducing the activity of KCNT1” is meant decreasing the level of an activity related to KCNT1 (e.g., an ion channel function). The activity level of KCNT1 may be measured using any method known in the art (e.g., using standard biophysical methods).

[0118] By “reducing the level of KCNT1” is meant decreasing the amount of KCNT1 in a cell or subject, e.g., by administering an oligonucleotide to the cell or subject. The level of KCNT1 may be measured using any method known in the art (e.g., by measuring the levels of KCNT1 mRNA or levels of KCNT1 protein in a cell or a subject).

[0119] As used herein, the term “inhibitor” refers to any agent which reduces the level and/or activity of a protein (e.g., KCNT1). Non-limiting examples of inhibitors include polynucleotides (e.g., oligonucleotide, e.g., ASOs). The term “inhibiting,” as used herein, is used interchangeably with “reducing,” “silencing,” “downregulating,” “suppressing,” and other similar terms, and includes any level of inhibition.

[0120] The phrase “contacting a cell with an oligonucleotide,” such as an oligonucleotide, as used herein, includes contacting a cell by any possible means. Contacting a cell with an oligonucleotide includes contacting a cell in vitro with the oligonucleotide or contacting a cell in vivo with the oligonucleotide. The contacting may be done directly or indirectly. Thus, for example, the oligonucleotide may be put into physical contact with the cell by the individual performing the method, or alternatively, the oligonucleotide agent may be put into a situation that will permit or cause it to subsequently come into contact with the cell.

[0121] Contacting a cell in vitro may be done, for example, by incubating the cell with the oligonucleotide. Contacting a cell in vivo may be done, for example, by injecting the oligonucleotide into or near the tissue where the cell is located, or by injecting the oligonucleotide agent into another area, e.g., the bloodstream or the subcutaneous space, such that the agent will subsequently reach the tissue where the cell to be contacted is located. For example, the oligonucleotide may contain and/or be coupled to a ligand, e.g., GalNAc3, that directs the oligonucleotide to a site of interest, e.g., the liver. Combinations of in vitro and in vivo methods of contacting are also possible. For example, a cell may also be contacted in vitro with an oligonucleotide and subsequently transplanted into a subject.

[0122] In one embodiment, contacting a cell with an oligonucleotide includes “introducing” or “delivering the oligonucleotide into the cell” by facilitating or effecting uptake or absorption into the cell. Absorption or uptake of an ASO can occur through unaided diffusive or active cellular processes, or by auxiliary agents or devices. Introducing an oligonucleotide into a cell may be in vitro and/or in vivo. For example, for in vivo introduction, oligonucleotides can be injected into a tissue site or administered systemically. In vitro introduction into a cell includes methods known in the art such as electroporation and lipofection. Further approaches are described herein below and/or are known in the art.

[0123] As used herein, “lipid nanoparticle” or “LNP” is a vesicle comprising a lipid layer encapsulating a pharmaceutically active molecule, such as a nucleic acid molecule, e.g., an oligonucleotide. LNP refers to a stable nucleic acid-lipid particle. LNPs typically contain a cationic lipid, a non-cationic lipid, and a lipid that prevents aggregation of the particle (e.g., a PEG-lipid conjugate). LNPs are described in, for example, U.S. Pat. Nos. 6,858,225; 6,815,432; 8,158,601; and 8,058,069, the entire contents of which are hereby incorporated herein by reference.

[0124] As used herein, the term “liposome” refers to a vesicle composed of amphiphilic lipids arranged in at least one bilayer, e.g., one bilayer or a plurality of bilayers. Liposomes include unilamellar and multilamellar vesicles that have a membrane formed from a lipophilic material and an aqueous interior. The aqueous portion contains the oligonucleotide composition. The lipophilic material isolates the aqueous interior from an aqueous exterior, which typically does not include the oligonucleotide composition, although in some examples, it may. Liposomes also include “sterically stabilized” liposomes, a term which, as used herein, refers to liposomes comprising one or more specialized lipids that, when incorporated into liposomes, result in enhanced circulation lifetimes relative to liposomes lacking such specialized lipids.

[0125] “Micelles” are defined herein as a particular type of molecular assembly in which amphipathic molecules are arranged in a spherical structure such that all the hydrophobic portions of the molecules are directed inward, leaving the hydrophilic portions in contact with the surrounding aqueous phase. The converse arrangement exists if the environment is hydrophobic.

[0126] The term “antisense,” as used herein, refers to a nucleic acid comprising an oligonucleotide or polynucleotide that is sufficiently complementary to all or a portion of a gene, primary transcript, or processed mRNA, so as to interfere with expression of the endogenous gene (e.g., KCNT1). “Complementary” polynucleotides are those that are capable of base pairing according to the standard Watson-Crick complementarity rules. Specifically, purines will base pair with pyrimidines to form a combination of guanine paired with cytosine (G:C) and adenine paired with either thymine (A:T) in the case of DNA, or adenine paired with uracil (A:U) in the case of RNA. It is understood that two polynucleotides may hybridize to each other even if they are not completely complementary to each other, provided that each has at least one region that is substantially complementary to the other.

[0127] As used herein, the terms “effective amount,” “therapeutically effective amount,” and “a “sufficient amount” of an agent that reduces the level and/or activity of KCNT1 (e.g., in a cell or a subject) described herein refer to a quantity sufficient to, when administered to the subject, including a human, effect beneficial or desired results, including clinical results, and, as such, an “effective amount” or synonym thereto depends on the context in which it is being applied. For example, in the context of treating a KCNT1 related disorder, it is an amount of the agent that reduces the level and/or activity of KCNT1 sufficient to achieve a treatment response as compared to the response obtained without administration of the agent that reduces the level and/or activity of KCNT1. The amount of a given agent that reduces the level and/or activity of KCNT1 described herein that will correspond to such an amount will vary depending upon various factors, such as the given agent, the pharmaceutical formulation, the route of administration, the type of disease or disorder, the identity of the subject (e.g., age, sex, and/or weight) or host being treated, and the like, but can nevertheless be routinely determined by one of skill in the art. Also, as used herein, a “therapeutically effective amount” of an agent that reduces the level and/or activity of KCNT1 of the present disclosure is an amount which results in a beneficial or desired result in a subject as compared to a control. As defined herein, a therapeutically effective amount of an agent that reduces the level and/or activity of KCNT1 of the present disclosure may be readily determined by one of ordinary skill by routine methods known in the art. Dosage regimen may be adjusted to provide the optimum therapeutic response.

[0128] “Prophylactically effective amount,” as used herein, is intended to include the amount of an oligonucleotide that, when administered to a subject having or predisposed to having a KCNT1 related disorder, is sufficient to prevent or ameliorate the disease or one or more symptoms of the disease. Ameliorating the disease includes slowing the course of the disease or reducing the severity of later-developing disease. The “prophylactically effective amount” may vary depending on the oligonucleotide, how the agent is administered, the degree of risk of disease, and the history, age, weight, family history, genetic makeup, the types of preceding or concomitant treatments, if any, and other individual characteristics of the subject to be treated. A prophylactically effective amount also refer to, for example, an amount of the agent reduces the level and/or activity of KCNT1 (e.g., in a cell or a subject) described herein refer to a quantity sufficient to, when administered to the subject, including a human, to delay the onset of a KCNT1 related disorder, as described herein, by at least 120 days, for example, at least 6 months, at least 12 months, at least 2 years, at least 3 years, at least 4 years, at least 5 years, at least 10 years or more, when compared with the predicted onset.

[0129] A “therapeutically-effective amount” or “prophylactically effective amount” also includes an amount (either administered in a single or in multiple doses) of an oligonucleotide that produces some desired local or systemic effect at a reasonable benefit/risk ratio applicable to any treatment. Oligonucleotides employed in the methods of the present invention may be administered in a sufficient amount to produce a reasonable benefit/risk ratio applicable to such treatment.

[0130] As used herein, the term “region of complementarity” refers to the region on the oligonucleotide that is substantially complementary to all or a portion of a gene, primary transcript, a sequence (e.g., a target sequence, e.g., a KCNT1 mRNA nucleotide sequence or KCNT1 mRNA transcript variant), or processed mRNA, so as to interfere with expression of the endogenous gene (e.g., KCNT1). Where the region of complementarity is not fully complementary to the target sequence, the mismatches can be in the internal or terminal regions of the molecule. Generally, the most tolerated mismatches are in the terminal regions, e.g., within 5, 4, 3, or 2 nucleotides of the 5′- and/or 3′-terminus of the oligonucleotide.

[0131] As used herein, the term “a subject identified as having a KCNT1 related disorder” refers to a subject identified as having a molecular or pathological state, disease or condition of or associated with a KCNT1 related disorder, such as the identification of a KCNT1 related disorder or symptoms thereof, or to refer to identification of a subject having or suspected of having a KCNT1 related disorder who may benefit from a particular treatment regimen.

[0132] As used herein, “KCNT1 related disorder,” refers to a class of genetic diseases or disorders characterized by aberrant function of KCNT1. KCNT1 related disorders include, for example, epilepsy of infancy with migrating focal seizures (EIMFS), autosomal dominant nocturnal frontal lobe epilepsy (ADNFLE), West syndrome, infantile spasms, epileptic encephalopathy, focal epilepsy, Ohtahara syndrome, developmental epileptic encephalopathy, and Lennox Gastaut syndrome

[0133] By “determining the level of a protein” is meant the detection of a protein, or an mRNA encoding the protein, by methods known in the art either directly or indirectly. “Directly determining” means performing a process (e.g., performing an assay or test on a sample or “analyzing a sample” as that term is defined herein) to obtain the physical entity or value. “Indirectly determining” refers to receiving the physical entity or value from another party or source (e.g., a third-party laboratory that directly acquired the physical entity or value). Methods to measure protein level generally include, but are not limited to, western blotting, immunoblotting, enzyme-linked immunosorbent assay (ELISA), radioimmunoassay (RIA), immunoprecipitation, immunofluorescence, surface plasmon resonance, chemiluminescence, fluorescent polarization, phosphorescence, immunohistochemical analysis, matrix-assisted laser desorption/ionization time-of-flight (MALDI-TOF) mass spectrometry, liquid chromatography (LC)-mass spectrometry, microcytometry, microscopy, fluorescence activated cell sorting (FACS), and flow cytometry, as well as assays based on a property of a protein including, but not limited to, enzymatic activity or interaction with other protein partners. Methods to measure mRNA levels are known in the art.

[0134] “Percent (%) sequence identity” with respect to a reference polynucleotide or polypeptide sequence is defined as the percentage of nucleic acids or amino acids in a candidate sequence that are identical to the nucleic acids or amino acids in the reference polynucleotide or polypeptide sequence, after aligning the sequences and introducing gaps, if necessary, to achieve the maximum percent sequence identity. Alignment for purposes of determining percent nucleic acid or amino acid sequence identity can be achieved in various ways that are within the capabilities of one of skill in the art, for example, using publicly available computer software such as BLAST, BLAST-2, or Megalign software. Those skilled in the art can determine appropriate parameters for aligning sequences, including any algorithms needed to achieve maximal alignment over the full length of the sequences being compared. For example, percent sequence identity values may be generated using the sequence comparison computer program BLAST. As an illustration, the percent sequence identity of a given nucleic acid or amino acid sequence, A, to, with, or against a given nucleic acid or amino acid sequence, B, (which can alternatively be phrased as a given nucleic acid or amino acid sequence, A that has a certain percent sequence identity to, with, or against a given nucleic acid or amino acid sequence, B) is calculated as follows:

100 multiplied by (the fraction X/Y)

[0135] where X is the number of nucleotides or amino acids scored as identical matches by a sequence alignment program (e.g., BLAST) in that program's alignment of A and B, and where Y is the total number of nucleic acids in B. It will be appreciated that where the length of nucleic acid or amino acid sequence A is not equal to the length of nucleic acid or amino acid sequence B, the percent sequence identity of A to B will not equal the percent sequence identity of B to A.

[0136] By “level” is meant a level or activity of a protein, or mRNA encoding the protein (e.g., KCNT1), optionally as compared to a reference. The reference can be any useful reference, as defined herein. By a “decreased level” or an “increased level” of a protein is meant a decrease or increase in protein level, as compared to a reference (e.g., a decrease or an increase by about 5%, about 10%, about 15%, about 20%, about 25%, about 30%, about 35%, about 40%, about 45%, about 50%, about 55%, about 60%, about 65%, about 70%, about 75%, about 80%, about 85%, about 90%, about 95%, about 100%, about 150%, about 200%, about 300%, about 400%, about 500%, or more; a decrease or an increase of more than about 10%, about 15%, about 20%, about 50%, about 75%, about 100%, or about 200%, as compared to a reference; a decrease or an increase by less than about 0.01-fold, about 0.02-fold, about 0.1-fold, about 0.3-fold, about 0.5-fold, about 0.8-fold, or less; or an increase by more than about 1.2-fold, about 1.4-fold, about 1.5-fold, about 1.8-fold, about 2.0-fold, about 3.0-fold, about 3.5-fold, about 4.5-fold, about 5.0-fold, about 10-fold, about 15-fold, about 20-fold, about 30-fold, about 40-fold, about 50-fold, about 100-fold, about 1000-fold, or more). A level of a protein may be expressed in mass/vol (e.g., g/dL, mg/mL, μg/mL, and ng/mL) or percentage relative to total protein or mRNA in a sample.

[0137] The term “pharmaceutical composition,” as used herein, represents a composition containing a compound described herein formulated with a pharmaceutically acceptable excipient, and preferably manufactured or sold with the approval of a governmental regulatory agency as part of a therapeutic regimen for the treatment of disease in a mammal. Pharmaceutical compositions can be formulated, for example, for oral administration in unit dosage form (e.g., a tablet, capsule, caplet, gelcap, or syrup); for topical administration (e.g., as a cream, gel, lotion, or ointment); for intravenous administration (e.g., as a sterile solution free of particulate emboli and in a solvent system suitable for intravenous use); for intrathecal injection; for intracerebroventricular injections; for intraparenchymal injection; or in any other pharmaceutically acceptable formulation.

[0138] A “pharmaceutically acceptable excipient,” as used herein, refers any ingredient other than the compounds described herein (for example, a vehicle capable of suspending or dissolving the active compound) and having the properties of being substantially nontoxic and non-inflammatory in a subject. Excipients may include, for example: antiadherents, antioxidants, binders, coatings, compression aids, disintegrants, dyes (colors), emollients, emulsifiers, fillers (diluents), film formers or coatings, flavors, fragrances, glidants (flow enhancers), lubricants, preservatives, printing inks, sorbents, suspensing or dispersing agents, sweeteners, and waters of hydration. Exemplary excipients include, but are not limited to: butylated hydroxytoluene (BHT), calcium carbonate, calcium phosphate (dibasic), calcium stearate, croscarmellose, crosslinked polyvinyl pyrrolidone, citric acid, crospovidone, cysteine, ethylcellulose, gelatin, hydroxypropyl cellulose, hydroxypropyl methylcellulose, lactose, magnesium stearate, maltitol, mannitol, methionine, methylcellulose, methyl paraben, microcrystalline cellulose, polyethylene glycol, polyvinyl pyrrolidone, povidone, pregelatinized starch, propyl paraben, retinyl palmitate, shellac, silicon dioxide, sodium carboxymethyl cellulose, sodium citrate, sodium starch glycolate, sorbitol, starch (corn), stearic acid, sucrose, talc, titanium dioxide, vitamin A, vitamin E, vitamin C, and xylitol.

[0139] As used herein, the term “pharmaceutically acceptable salt” means any pharmaceutically acceptable salt of the compound of any of the compounds described herein. For example, pharmaceutically acceptable salts of any of the compounds described herein include those that are within the scope of sound medical judgment, suitable for use in contact with the tissues of humans and animals without undue toxicity, irritation, allergic response and are commensurate with a reasonable benefit/risk ratio. Pharmaceutically acceptable salts are well known in the art. For example, pharmaceutically acceptable salts are described in: Berge et al., J. Pharmaceutical Sciences 66:1-19, 1977 and in Pharmaceutical Salts: Properties, Selection, and Use, (Eds. P. H. Stahl and C. G. Wermuth), Wiley-VCH, 2008. The salts can be prepared in situ during the final isolation and purification of the compounds described herein or separately by reacting a free base group with a suitable organic acid.

[0140] The compounds described herein may have ionizable groups so as to be capable of preparation as pharmaceutically acceptable salts. These salts may be acid addition salts involving inorganic or organic acids or the salts may, in the case of acidic forms of the compounds described herein, be prepared from inorganic or organic bases. Frequently, the compounds are prepared or used as pharmaceutically acceptable salts prepared as addition products of pharmaceutically acceptable acids or bases. Suitable pharmaceutically acceptable acids and bases and methods for preparation of the appropriate salts are well-known in the art. Salts may be prepared from pharmaceutically acceptable non-toxic acids and bases including inorganic and organic acids and bases. Representative acid addition salts include acetate, adipate, alginate, ascorbate, aspartate, benzenesulfonate, benzoate, bisulfate, borate, butyrate, camphorate, camphorsulfonate, citrate, cyclopentanepropionate, digluconate, dodecylsulfate, ethanesulfonate, fumarate, glucoheptonate, glycerophosphate, hemisulfate, heptonate, hexanoate, hydrobromide, hydrochloride, hydroiodide, 2-hydroxy-ethanesulfonate, lactobionate, lactate, laurate, lauryl sulfate, malate, maleate, malonate, methanesulfonate, 2-naphthalenesulfonate, nicotinate, nitrate, oleate, oxalate, palmitate, pamoate, pectinate, persulfate, 3-phenylpropionate, phosphate, picrate, pivalate, propionate, stearate, succinate, sulfate, tartrate, thiocyanate, toluenesulfonate, undecanoate, and valerate salts. Representative alkali or alkaline earth metal salts include sodium, lithium, potassium, calcium, and magnesium, as well as nontoxic ammonium, quaternary ammonium, and amine cations, including, but not limited to ammonium, tetramethylammonium, tetraethylammonium, methylamine, dimethylamine, trimethylamine, triethylamine, and ethylamine.

[0141] By a “reference” is meant any useful reference used to compare protein or mRNA levels or activity. The reference can be any sample, standard, standard curve, or level that is used for comparison purposes. The reference can be a normal reference sample or a reference standard or level. A “reference sample” can be, for example, a control, e.g., a predetermined negative control value such as a “normal control” or a prior sample taken from the same subject; a sample from a normal healthy subject, such as a normal cell or normal tissue; a sample (e.g., a cell or tissue) from a subject not having a disease; a sample from a subject that is diagnosed with a disease, but not yet treated with a compound described herein; a sample from a subject that has been treated by a compound described herein; or a sample of a purified protein (e.g., any described herein) at a known normal concentration. By “reference standard or level” is meant a value or number derived from a reference sample. A “normal control value” is a pre-determined value indicative of non-disease state, e.g., a value expected in a healthy control subject. Typically, a normal control value is expressed as a range (“between X and Y”), a high threshold (“no higher than X”), or a low threshold (“no lower than X”). A subject having a measured value within the normal control value for a particular biomarker is typically referred to as “within normal limits” for that biomarker. A normal reference standard or level can be a value or number derived from a normal subject not having a disease or disorder (e.g., a KCNT1 related disorder); a subject that has been treated with a compound described herein. In preferred embodiments, the reference sample, standard, or level is matched to the sample subject sample by at least one of the following criteria: age, weight, sex, disease stage, and overall health. A standard curve of levels of a purified protein, e.g., any described herein, within the normal reference range can also be used as a reference.

[0142] As used herein, the term “subject” refers to any organism to which a composition in accordance with the invention may be administered, e.g., for experimental, diagnostic, prophylactic, and/or therapeutic purposes. Typical subjects include any animal (e.g., mammals such as mice, rats, rabbits, non-human primates, and humans). A subject may seek or be in need of treatment, require treatment, be receiving treatment, be receiving treatment in the future, or be a human or animal who is under care by a trained professional for a particular disease or condition.

[0143] As used herein, the terms “treat,” “treated,” or “treating” mean both therapeutic treatment and prophylactic or preventative measures wherein the object is to prevent or slow down (lessen) an undesired physiological condition, disorder, or disease, or obtain beneficial or desired clinical results. Beneficial or desired clinical results include, but are not limited to, alleviation of symptoms; diminishment of the extent of a condition, disorder, or disease; stabilized (i.e., not worsening) state of condition, disorder, or disease; delay in onset or slowing of condition, disorder, or disease progression; amelioration of the condition, disorder, or disease state or remission (whether partial or total), whether detectable or undetectable; an amelioration of at least one measurable physical parameter, not necessarily discernible by the subject; or enhancement or improvement of condition, disorder, or disease. Treatment includes eliciting a clinically significant response without excessive levels of side effects. Treatment also includes prolonging survival as compared to expected survival if not receiving treatment.

[0144] As used herein, the term “derivative” refers to naturally-occurring, synthetic, and semi-synthetic analogues of a compound, peptide, protein, or other substance described herein. A derivative of a compound, peptide, protein, or other substance described herein may retain or improve upon the biological activity of the original material.

[0145] The details of one or more embodiments of the invention are set forth in the description below. Other features, objects, and advantages of the invention will be apparent from the description and from the claims.

[0146] KCNT1 Related Disorders

[0147] The present inventors have found that inhibition or depletion of KCNT1 level and/or activity in a cell is effective in the treatment of a KCNT1 related disorder. Accordingly, the invention features useful compositions and methods to treat KCNT1 related disorders, e.g., in a subject in need thereof. The invention features single-stranded oligonucleotides that include 18-22 (e.g., 18, 19, 20, 21, and 22) linked nucleosides in length having a region of at least 18 (e.g., 18, 19, 20, 21, and 22) contiguous nucleobases of any one of SEQ ID NOs: 1-3525 (e.g., SEQ ID NOs: 1-116 or 1, 4, 5, 6, 8, 10, 12, 13, 15, 17, 28, 29, 62, 625-649, 1046, 1071, 1195-1224, 1388, 1496-1567, 2591-2631, or 3395-3525). Also featured are oligonucleotides that cross-hybridize between human and mouse, human and monkey, or, human, mouse, and monkey KCNT1. The sequence of human KCNT1 mRNA transcript (NCBI NM_020822.2) is provided as SEQ ID NO: 3526. The sequence of mouse KCNT1 mRNA transcript is provided as SEQ ID NO: 3533. The sequence of cynomolgous monkey (Macaca fascicularis) KCNT1 mRNA transcript is provided as SEQ ID NO: 3534. The oligonucleotides (e.g., chemically modified oligonucleotides) may be administered to a subject with a KCNT1 related disorder (e.g., epilepsy) in order to treat, reduce the symptoms of, or prevent the KCNT1 related disorder. The oligonucleotides are antisense (e.g., at least partially complementary) to a target region of KCNT1 (e.g., KCNT1 mRNA, including pre-mRNA and processed mRNA). Following administration, the oligonucleotides reduce the level, expression, and/or activity of KCNT1 (e.g., KCNT1 mRNA and/or protein), thereby providing a therapeutic effect to the subject with a KCNT1 related disorder.

[0148] KCNT1 encodes an intracellular sodium-activated potassium channel (potassium sodium-activated channel subfamily T member 1 that is expressed in the central nervous system. Also known as Slack, KCNT1 is a member of the Slo-type family of potassium channel genes and can co-assemble with other Slo channel subunits. These channels can mediate a sodium-sensitive potassium current (IKNa), which is triggered by an influx of sodium channels ions through sodium channels or neurotransmitter receptors. Delayed outward current may be involved in regulating neuronal excitability. The amino acid sequence of wild type KCNT1 (UNIPROT ID Q5JUK3-3) is provided as SEQ ID NO: 3527. The amino acid sequence of G288S KCNT1 is provided as SEQ ID NO: 3528. The amino acid sequence of R398Q KCNT1 is provided as SEQ ID NO: 3529. The amino acid sequence of R428Q KCNT1 is provided as SEQ ID NO: 3530. The amino acid sequence of R928C KCNT1 is provided as SEQ ID NO: 3531. The amino acid sequence of A934T KCNT1 is provided as SEQ ID NO: 3532.

[0149] Mutations in KCNT1 (e.g., gain-of-function mutations) have been associated with particular forms of epilepsy, including epilepsy of infancy with migrating focal seizures (EIMFS), autosomal dominant nocturnal frontal lobe epilepsy (ADNFLE), West syndrome, infantile spasms, epileptic encephalopathy, focal epilepsy, Ohtahara syndrome, developmental epileptic encephalopathy, and Lennox Gastaut syndrome.

[0150] EIMFS is a rare and debilitating genetic condition characterized by an early onset (before 6 months of age) of almost continuous heterogeneous focal seizures, where seizures appear to migrate from one brain region and hemisphere to another. Subjects with EIMFS may be intellectually impaired, non-verbal and non-ambulatory. Subjects with EIMFS may have a mutation (e.g., gain-of-function mutation) in KCNT1, such as V271F, G288S, R428Q, R474Q, R474H, R474C, I760M, A934T and P924L.

[0151] ADNFLE has a later onset than EIMFS, generally in mid-childhood, and is generally a less severe condition. It is characterized by nocturnal frontal lobe seizures and can result in psychiatric, behavioral and cognitive disabilities in subjects with the condition. Subjects with ADNFLE may have a mutation (e.g., gain-of-function mutation) in KCNT1, such as M896I, R398Q, Y796H and R928C.

[0152] West syndrome is a severe form of epilepsy in which subjects exhibit one or more of infantile spasms, an interictal electroencephalogram (EEG) pattern termed hypsarrhythmia, and mental retardation. Subjects with West syndrome may have a mutation (e.g., gain-of-function mutation) in KCNT1, such as G652V and R474H.

[0153] Any of the KCNT1 related disorders described herein may be treated by administering the oligonucleotides (e.g., chemically modified oligonucleotides) of any one of SEQ ID NOs: 1-3525 (e.g., SEQ ID NOs: 1-116 or 1, 4, 5, 6, 8, 10, 12, 13, 15, 17, 28, 29, 62, 625-649, 1046, 1071, 1195-1224, 1388, 1496-1567, 2591-2631, or 3395-3525) or oligonucleotides that are 18-22 nucleosides in length and have a region of at least 18 contiguous nucleosides, at least 19 contiguous nucleosides, at least 20 contiguous nucleosides, at least 21 contiguous nucleosides, or at least 22 contiguous nucleosides from any one of SEQ ID NOs: 1-3525 (e.g., SEQ ID NOs: 1-116 or 1, 4, 5, 6, 8, 10, 12, 13, 15, 17, 28, 29, 62, 625-649, 1046, 1071, 1195-1224, 1388, 1496-1567, 2591-2631, or 3395-3525). In some embodiments, any of the KCNT1 related disorders described herein may be treated by administering the oligonucleotides (e.g., chemically modified oligonucleotides) of any one of SEQ ID NOs: 4, 1046, 1071, 1388, 1551, 1546, or 2595.

[0154] The subject to be treated may have a gain-of-function mutation in KCNT1. The gain-of-function mutation may be one or more of V271F, L274I, G288S, F346L, R398Q, R428Q, R474H, F502V, M516V, K629N, I760M, Y796H, E893K, M896I, M896K, P924L, R928C, F932I, A934T, A966T, H257D, R262Q, Q270E, V340M, C377S, P409S, L437F, R474C, A477T, R565H, K629E, G652V, I760F, Q906H, R933G, R950Q, R961H, R1106Q, K1154Q, R474Q, Y1903C, H469L, M896R, K946E, and R950L.

[0155] Table 1 below shows single nucleotide polymorphisms (SNPs) in KCNT1 transcript and the position of each SNP in comparison to the KCNT1 transcript (e.g, SEQ ID NO: 3526). The phrase “KCNT1 transcript variant” or “KCNT1 mRNA transcript variant” refers to a KCNT1 transcript that differs from the wild type KCNT1 transcript (e.g., SEQ ID NO: 3526) by at least one nucleotide (e.g., two, three, four, or five nucleotides).

TABLE 1
SNPs in KCNT1. Further shown is the corresponding Amino Acid Mutation due to
each SNP. RS No. refers to the dbSNP ID reference number, if the SNP has been entered
into the dbSNP database.
Single Nucleotide Polymorphisms (SNPs) in KCNT1 transcript (e.g., KCNT1 transcript variant)
and their positions in SEQ ID NO: 3526

| | | | | Amino |
|---|---|---|---|---|
| | | | Position in SEQ ID | Acid |
| RS No. | HGVS Nomenclature | Polymorphism | NO: 3526 | Mutation |
| rs397515403 | NM_020822.2 c.2800 G > A | G/A | 2874 | A934T |
| rs397515402 | NM_020822.2 c.1283 G > A | G/A | 1357 | R428Q |
| rs587777264 | NM_020822.2 c.862 G > A | G/A | 936 | G288S |
| rs397515404 | NM_020822.2 c.1421 G > A | G/A | 1495 | R474H |
| rs866242631 | NM_020822.2 c.1420 C > T | C/T | 1494 | R474C |
| rs886043455 | NM_020822.2 c.2849 G > A | G/A | 2923 | R950Q |
| rs397515407 | NM_020822.2 c.1193 G > A | G/A | 1267 | R398Q |
| rs397515406 | NM_020822.2 c.2386 T > C | T/C | 2460 | Y796H |
| | NM_020822.2 c.1038 C > G | C/G | 1112 | F346L |
| | NM_020822.2 c.2771 C > T | C/T | 2845 | P924L |
| | NM_020822.2 c.811 G > T | G/T | 885 | V271F |

[0156] Oligonucleotide Agents

[0157] Agents described herein that reduce the level and/or activity of KCNT1 in a cell may be, for example, a polynucleotide, e.g., an oligonucleotide. These agents reduce the level of an activity related to KCNT1, or a related downstream effect, or reduce the level of KCNT1 in a cell or subject.

[0158] In some embodiments, the agent that reduces the level and/or activity of KCNT1 is a polynucleotide. In some embodiments, the polynucleotide is a single-stranded oligonucleotide (e.g., SEQ ID NOs: 1-3525 (e.g., SEQ ID NOs: 1-116 or 1, 4, 5, 6, 8, 10, 12, 13, 15, 17, 28, 29, 62, 625-649, 1046, 1071, 1195-1224, 1388, 1496-1567, 2591-2631, or 3395-3525)), e.g., that acts by way of an RNase H-mediated pathway. Oligonucleotides include DNA and DNA/RNA chimeric molecules, typically about 10 to 30 nucleotides in length, which recognize polynucleotide target sequences or sequence portions through hydrogen bonding interactions with the nucleotide bases of the target sequence (e.g., KCNT1 mRNA transcript or KCNT1 mRNA transcript variant). An oligonucleotide molecule can decrease the expression level (e.g., protein level or mRNA level) of KCNT1. For example, an oligonucleotide includes oligonucleotides that targets full-length KCNT1. In some embodiments, the oligonucleotide molecule recruits an RNase H enzyme, leading to target mRNA degradation. In various embodiments, the oligonucleotide may be at least 16 nucleobases in length. In various embodiments, the oligonucleotide may be 17, 18, 19, 20, 21, or 22 nucleobases in length. In various embodiments, the oligonucleotide may be at least 17, at least 18, at least 19, at least 20, at least 21, or at least 22 nucleobases in length. In various embodiments, the oligonucleotide may be between 17-22, 18-21, or 19-20 nucleobases in length.

[0159] In some embodiments, the oligonucleotide decreases the level and/or activity of a positive regulator of function. In other embodiments, the oligonucleotide increases the level and/or activity of an inhibitor of a positive regulator of function. In some embodiments, the oligonucleotide increases the level and/or activity of a negative regulator of function.

[0160] In some embodiments, the oligonucleotide (e.g., SEQ ID NOs: 1-3525 (e.g., SEQ ID NOs: 1-116 or 1, 4, 5, 6, 8, 10, 12, 13, 15, 17, 28, 29, 62, 625-649, 1046, 1071, 1195-1224, 1388, 1496-1567, 2591-2631, or 3395-3525)) decreases the level and/or activity or function of KCNT1. In some embodiments, the oligonucleotide (e.g., SEQ ID NOs: 1-3525 (e.g., SEQ ID NOs: 1-116 or 1, 4, 5, 6, 8, 10, 12, 13, 15, 17, 28, 29, 62, 625-649, 1046, 1071, 1195-1224, 1388, 1496-1567, 2591-2631, or 3395-3525)) inhibits expression of KCNT1. In other embodiments, the oligonucleotide (e.g., SEQ ID NOs: 1-3525 (e.g., SEQ ID NOs: 1-116 or 1, 4, 5, 6, 8, 10, 12, 13, 15, 17, 28, 29, 62, 625-649, 1046, 1071, 1195-1224, 1388, 1496-1567, 2591-2631, or 3395-3525)) increases degradation of KCNT1 and/or decreases the stability (e.g., half-life) of KCNT1. In some embodiments, an oligonucleotide (e.g., SEQ ID NOs: 1-3525 (e.g., SEQ ID NOs: 1-116 or 1, 4, 5, 6, 8, 10, 12, 13, 15, 17, 28, 29, 62, 625-649, 1046, 1071, 1195-1224, 1388, 1496-1567, 2591-2631, or 3395-3525)) can be chemically synthesized.

[0161] In some embodiments, an oligonucleotide (e.g., SEQ ID NOs: 1-3525 (e.g., SEQ ID NOs: 1-116 or 1, 4, 5, 6, 8, 10, 12, 13, 15, 17, 28, 29, 62, 625-649, 1046, 1071, 1195-1224, 1388, 1496-1567, 2591-2631, or 3395-3525)) includes an oligonucleotide having a region of complementarity (e.g., a contiguous nucleobase region) which is complementary to at least a part of an mRNA formed in the expression of a KCNT1 gene. In some embodiments, the region of complementarity may be about 30 nucleotides or less in length (e.g., about 30, 29, 28, 27, 26, 25, 24, 23, 22, 21, 20, 19, or 18 nucleotides or less in length). In some embodiments, upon contact with a cell expressing the KCNT1 gene, the oligonucleotide may inhibit the expression of the KCNT1 gene (e.g., a human, a primate, a non-primate, or a bird KCNT1 gene) by at least about 10% as assayed by, for example, a PCR or branched DNA (bDNA)-based method, or by a protein-based method, such as by immunofluorescence analysis, using, for example, Western Blotting or flowcytometric techniques.

[0162] In some embodiments, the region of complementarity to the target sequence may be between 10 and 30 linked nucleosides in length, e.g., between 10-29, 10-28, 10-27, 10-26, 10-25, 10-24, 10-23, 10-22, 10-21, 10-20, 10-19, 10-18, 10-17, 10-16, 10-15, 10-14, 10-13, 10-12, 15-29, 15-28, 15-27, 15-26, 15-25, 15-24, 15-23, 15-22, 15-21, 15-20, 15-19, 15-18, 15-17, 18-30, 18-29, 18-28, 18-27, 18-26, 18-25, 18-24, 18-23, 18-22, 18-21, 18-20, 19-30, 19-29, 19-28, 19-27, 19-26, 19-25, 19-24, 19-23, 19-22, 19-21, 19-20, 20-30, 20-29, 20-28, 20-27, 20-26, 20-25, 20-24, 20-23, 20-22, 20-21, 21-30, 21-29, 21-28, 21-27, 21-26, 21-25, 21-24, 21-23, or 21-22 linked nucleosides in length. Ranges and lengths intermediate to the above recited ranges and lengths are also contemplated to be part of the invention.

[0163] In some embodiments, an oligonucleotide can be synthesized by standard methods known in the art as further discussed below, e.g., by use of an automated DNA synthesizer, such as are commercially available from, for example, Biosearch, Applied Biosystems, Inc.

[0164] In some embodiments, an oligonucleotide compound can be prepared using solution-phase or solid-phase organic synthesis or both. Organic synthesis offers the advantage that the oligonucleotide comprising unnatural or alternative nucleotides can be easily prepared. Single-stranded oligonucleotides of the invention can be prepared using solution-phase or solid-phase organic synthesis or both.

[0165] In some embodiments, an oligonucleotide of the invention includes a region of at least 10 contiguous nucleobases having at least 80% (e.g., at least 85%, at least 86%, at least 87%, at least 88%, at least 89%, at least 90%, at least 91%, at least 92%, at least 93%, at least 94%, at least 95%, at least 96%, at least 97%, at least 98%, at least 99%, or 100%) complementary to at least 10 contiguous nucleotides of a KCNT1 transcript (e.g., SEQ ID NO: 3526) or KCNT1 transcript variant. In one aspect, an oligonucleotide of the invention includes a region of at least 10 contiguous nucleobases that are complementary to 10 contiguous nucleotides of a KCNT1 transcript (e.g., SEQ ID NO: 3526) or KCNT1 transcript variant. In some embodiments, the oligonucleotide comprises a sequence complementary to at least 10 contiguous nucleotides, 11 contiguous nucleotides, 12 contiguous nucleotides, 13 contiguous nucleotides, 14 contiguous nucleotides, 15 contiguous nucleotides, 16 contiguous nucleotides, 17 contiguous nucleotides, 18 contiguous nucleotides, 19 contiguous nucleotides, or 20 contiguous nucleotides of a KCNT1 transcript (e.g., SEQ ID NO: 3526) or KCNT1 transcript variant. In some embodiments, the oligonucleotide comprises a sequence complementary to between 19-23 contiguous nucleotides, the oligonucleotide sequence may be selected from any one of SEQ ID NOs: 1-3525 (e.g., SEQ ID NOs: 1-116 or 1, 4, 5, 6, 8, 10, 12, 13, 15, 17, 28, 29, 62, 625-649, 1046, 1071, 1195-1224, 1388, 1496-1567, 2591-2631, or 3395-3525). In some embodiments, an oligonucleotides (e.g., chemically modified oligonucleotide) is selected from any one of SEQ ID NOs: 4, 1046, 1071, 1388, 1551, 1546, and 2595. In this aspect, the sequence is substantially complementary to a sequence of an mRNA generated in the expression of a KCNT1 gene.

[0166] In some embodiments, an oligonucleotide has a nucleic acid sequence with at least 50% (e.g., at least 50%, at least 60%, at least 70%, at least 80%, at least 85%, at least 86%, at least 87%, at least 88%, at least 89%, at least 90%, at least 91%, at least 92%, at least 93%, at least 94%, at least 95%, at least 96%, at least 97%, at least 98%, at least 99%, or 100%) sequence identity to the nucleic acid sequence any one of SEQ ID NOs: 1-3525 (e.g., SEQ ID NOs: 1-116 or 1, 4, 5, 6, 8, 10, 12, 13, 15, 17, 28, 29, 62, 625-649, 1046, 1071, 1195-1224, 1388, 1496-1567, 2591-2631, or 3395-3525). In some embodiments, an oligonucleotide has a nucleic acid sequence with at least 85% sequence identity to the nucleic acid sequence of any one of SEQ ID NOs: 1-3525 (e.g., SEQ ID NOs: 1-116 or 1, 4, 5, 6, 8, 10, 12, 13, 15, 17, 28, 29, 62, 625-649, 1046, 1071, 1195-1224, 1388, 1496-1567, 2591-2631, or 3395-3525). In some embodiments, an oligonucleotide has a nucleic acid sequence of any one of SEQ ID NOs: 1-3525 (e.g., SEQ ID NOs: 1-116 or 1, 4, 5, 6, 8, 10, 12, 13, 15, 17, 28, 29, 62, 625-649, 1046, 1071, 1195-1224, 1388, 1496-1567, 2591-2631, or 3395-3525).

[0167] In some embodiments, an oligonucleotide has a nucleic acid sequence with at least 50% (e.g., at least 50%, at least 60%, at least 70%, at least 80%, at least 85%, at least 86%, at least 87%, at least 88%, at least 89%, at least 90%, at least 91%, at least 92%, at least 93%, at least 94%, at least 95%, at least 96%, at least 97%, at least 98%, at least 99%, or 100%) sequence identity to the nucleic acid sequence any one of SEQ ID NOs: 4, 1046, 1071, 1388, 1551, 1546, or 2595.

[0168] It will be understood that, although, in some embodiments, the sequences in SEQ ID NOs: 1-3525 (e.g., SEQ ID NOs: 1-116 or 1, 4, 5, 6, 8, 10, 12, 13, 15, 17, 28, 29, 62, 625-649, 1046, 1071, 1195-1224, 1388, 1496-1567, 2591-2631, or 3395-3525) are described as unmodified and/or un-conjugated sequences, the nucleosides of the oligonucleotide of the invention e.g., an oligonucleotide of the invention, may comprise any one of the sequences set forth in any one of SEQ ID NOs: 1-3525 (e.g., SEQ ID NOs: 1-116 or 1, 4, 5, 6, 8, 10, 12, 13, 15, 17, 28, 29, 62, 625-649, 1046, 1071, 1195-1224, 1388, 1496-1567, 2591-2631, or 3395-3525) that is an alternative nucleoside and/or conjugated as described in detail below. In some embodiments, an oligonucleotide comprising any of the sequences shown in SEQ ID NOs: 1-3525 (e.g., SEQ ID NOs: 1-116 or 1, 4, 5, 6, 8, 10, 12, 13, 15, 17, 28, 29, 62, 625-649, 1046, 1071, 1195-1224, 1388, 1496-1567, 2591-2631, or 3395-3525) can be unmodified or modified ribonucleic acid (RNA), deoxyribonucleic acid (DNA), or a mixture of RNA and DNA.

[0169] The skilled person is well aware that oligonucleotides having a structure of between about 18-20 base pairs may be particularly effective in inducing RNase H-mediated degradation. However, one can appreciate that shorter or longer oligonucleotides can also be effective. In the embodiments described above, by virtue of the nature of the oligonucleotide sequences provided herein, oligonucleotides described herein can include. It can be reasonably expected that shorter oligonucleotides minus only a few linked nucleosides on one or both ends can be similarly effective as compared to the oligonucleotides described above. Hence, oligonucleotides having a sequence of at least 8, 9, 10, 11, 12, 13, 14, 15, 16, 17, 18, 19, 20, or more contiguous linked nucleosides derived from one of the sequences provided herein (e.g., SEQ ID NOs: 1-3525 (e.g., SEQ ID NOs: 1-116 or 1, 4, 5, 6, 8, 10, 12, 13, 15, 17, 28, 29, 62, 625-649, 1046, 1071, 1195-1224, 1388, 1496-1567, 2591-2631, or 3395-3525)), and differing in their ability to inhibit the expression of a KCNT1 gene by not more than about 5, 10, 15, 20, 25, or 30% inhibition from an oligonucleotide comprising the full sequence, are contemplated to be within the scope of the present invention.

[0170] In some embodiments, the oligonucleotides described herein may function via nuclease-mediated degradation of the target nucleic acid, where the oligonucleotides of the invention are capable of recruiting a nuclease, particularly and endonuclease, preferably endoribonuclease (RNase) such as RNase H. Examples of oligonucleotide designs which operate via nuclease-mediated mechanisms are oligonucleotides which typically comprise a region of at least 5 or 6 DNA nucleosides and are flanked on one side or both sides by affinity enhancing alternative nucleosides, for example gapmers, headmers, and tailmers.

[0171] The RNase H activity of an oligonucleotide refers to its ability to recruit RNase H when in a duplex with a complementary RNA molecule. International application publication number WO 01/23613 (incorporated by reference herein) provides in vitro methods for determining RNase H activity, which may be used to determine the ability to recruit RNase H. Typically an oligonucleotide is deemed capable of recruiting RNase H if it, when provided with a complementary target nucleic acid sequence, has an initial rate, as measured in pmol/l/min, of at least 5%, such as at least 10% or more than 20% of the of the initial rate determined when using an oligonucleotide having the same base sequence as the modified oligonucleotide being tested, but containing only DNA monomers, with phosphorothioate linkages between all monomers in the oligonucleotide, and using the methodology provided by Example 91-95 of WO01/23613 (hereby incorporated by reference).

[0172] In some embodiments, the oligonucleotides described herein (e.g., SEQ ID NOs: 1-3525 (e.g., SEQ ID NOs: 1-116 or 1, 4, 5, 6, 8, 10, 12, 13, 15, 17, 28, 29, 62, 625-649, 1046, 1071, 1195-1224, 1388, 1496-1567, 2591-2631, or 3395-3525)) identify a site(s) in a KCNT1 transcript that is susceptible to RNase H-mediated cleavage. As such, the present invention further features oligonucleotides that target within this site(s). As used herein, an oligonucleotide is said to target within a particular site of an RNA transcript if the oligonucleotide promotes cleavage of the transcript anywhere within that particular site. Such an oligonucleotide will generally include at least about 5-10 contiguous linked nucleosides from one of the sequences provided herein coupled to additional linked nucleoside sequences taken from the region contiguous to the selected sequence in a KCNT1 gene.

[0173] Inhibitory oligonucleotides can be designed by methods well known in the art. While a target sequence is generally about 10-30 linked nucleosides in length, there is wide variation in the suitability of particular sequences in this range for directing cleavage of any given target RNA.

[0174] Oligonucleotides with homology sufficient to provide sequence specificity required to uniquely degrade any RNA can be designed using programs known in the art

[0175] Systematic testing of several designed species for optimization of the inhibitory oligonucleotide sequence can also be undertaken in accordance with the teachings provided herein. Considerations when designing interfering oligonucleotides include, but are not limited to, biophysical, thermodynamic, and structural considerations, base preferences at specific positions, and homology. The making and use of inhibitory therapeutic agents based on non-coding oligonucleotides are also known in the art.

[0176] Various software packages and the guidelines set out herein provide guidance for the identification of optimal target sequences for any given gene target, but an empirical approach can also be taken in which a “window” or “mask” of a given size (as a non-limiting example, 21 nucleotides) is literally or figuratively (including, e.g., in silico) placed on the target RNA sequence to identify sequences in the size range that can serve as target sequences. By moving the sequence “window” progressively one nucleotide upstream or downstream of an initial target sequence location, the next potential target sequence can be identified, until the complete set of possible sequences is identified for any given target size selected. This process, coupled with systematic synthesis and testing of the identified sequences (using assays as described herein or as known in the art) to identify those sequences that perform optimally can identify those RNA sequences that, when targeted with an oligonucleotide agent, mediate the best inhibition of target gene expression. Thus, while the sequences identified herein represent effective target sequences, it is contemplated that further optimization of inhibition efficiency can be achieved by progressively “walking the window” one nucleotide upstream or downstream of the given sequences to identify sequences with equal or better inhibition characteristics.

[0177] Further, it is contemplated that for any sequence identified herein, further optimization could be achieved by systematically either adding or removing linked nucleosides to generate longer or shorter sequences and testing those sequences generated by walking a window of the longer or shorter size up or down the target RNA from that point. Again, coupling this approach to generating new candidate targets with testing for effectiveness of oligonucleotides based on those target sequences in an inhibition assay as known in the art and/or as described herein can lead to further improvements in the efficiency of inhibition.

[0178] Further still, such optimized sequences can be adjusted by, e.g., the introduction of alternative nucleosides, alternative sugar moieties, and/or alternative internucleosidic linkages as described herein or as known in the art, including alternative nucleosides, alternative sugar moieties, and/or alternative internucleosidic linkages as known in the art and/or discussed herein to further optimize the molecule (e.g., increasing serum stability or circulating half-life, increasing thermal stability, enhancing transmembrane delivery, targeting to a particular location or cell type, increasing interaction with silencing pathway enzymes, increasing release from endosomes) as an expression inhibitor. An oligonucleotide agent as described herein can contain one or more mismatches to the target sequence. In one embodiment, an oligonucleotide as described herein contains no more than 3 mismatches. If the oligonucleotide contains mismatches to a target sequence, it is preferable that the area of mismatch is not located in the center of the region of complementarity. If the oligonucleotide contains mismatches to the target sequence, it is preferable that the mismatch be restricted to be within the last 5 nucleotides from either the 5′- or 3′-end of the region of complementarity. For example, for a 30-linked nucleoside oligonucleotide agent, the contiguous nucleobase region which is complementary to a region of a KCNT1 transcript (e.g., SEQ ID NO: 3526) or KCNT1 mRNA transcript variant, generally does not contain any mismatch within the central 5-10 linked nucleosides. The methods described herein or methods known in the art can be used to determine whether an oligonucleotide containing a mismatch to a target sequence is effective in inhibiting the expression of a KCNT1 gene. Consideration of the efficacy of oligonucleotides with mismatches in inhibiting expression of a KCNT1 gene is important, especially if the particular region of complementarity in a KCNT1 transcript (e.g., SEQ ID NO: 3526) or KCNT1 mRNA transcript variant is known to have polymorphic sequence variation within the population.

[0179] Construction of vectors for expression of polynucleotides for use in the invention may be accomplished using conventional techniques which do not require detailed explanation to one of ordinary skill in the art. For generation of efficient expression vectors, it is necessary to have regulatory sequences that control the expression of the polynucleotide. These regulatory sequences include promoter and enhancer sequences and are influenced by specific cellular factors that interact with these sequences, and are well known in the art.

### Alternative Oligonucleosides

[0180] In one embodiment, one or more of the linked nucleosides or internucleosidic linkages of the oligonucleotide of the invention, is naturally occurring, and does not comprise, e.g., chemical modifications and/or conjugations known in the art and described herein. In another embodiment, one or more of the linked nucleosides or internucleosidic linkages of an oligonucleotide of the invention, is chemically modified to enhance stability or other beneficial characteristics. Without being bound by theory, it is believed that certain modifications can increase nuclease resistance and/or serum stability or decrease immunogenicity. For example, oligonucleotides of the invention may contain nucleotides found to occur naturally in DNA or RNA (e.g., adenine, thymidine, guanosine, cytidine, uridine, or inosine) or may contain alternative nucleosides or internucleosidic linkages which have one or more chemical modifications to one or more components of the nucleotide (e.g., the nucleobase, sugar, or phospho-linker moiety). Oligonucleotides of the invention may be linked to one another through naturally occurring phosphodiester bonds, or may contain alternative linkages (e.g., covalently linked through phosphorothioate (e.g., Sp phosphorothioate or Rp phosphorothioate), 3′-methylenephosphonate, 5′-methylenephosphonate, 3′-phosphoamidate, 2′-5′ phosphodiester, guanidinium, S-methylthiourea, 2′-alkoxy, alkyl phosphate, or peptide bonds).

[0181] In certain embodiments of the invention, substantially all of the nucleosides or internucleosidic linkages of an oligonucleotide of the invention are alternative nucleosides. In other embodiments of the invention, all of the nucleosides or internucleosidic linkages of an oligonucleotide of the invention are alternative nucleosides. Oligonucleotides of the invention in which “substantially all of the nucleosides are alternative nucleosides” are largely but not wholly modified and can include not more than five, four, three, two, or one naturally occurring nucleosides. In still other embodiments of the invention, oligonucleotides of the invention can include not more than five, four, three, two, or one alternative nucleosides.

[0182] The nucleic acids featured in the invention can be synthesized and/or modified by methods well established in the art, such as those described in “Current protocols in nucleic acid chemistry,” Beaucage, S. L. et al. (Edrs.), John Wiley & Sons, Inc., New York, N.Y., USA, which is hereby incorporated herein by reference.

[0183] Alternative nucleotides and nucleosides include those with modifications including, for example, end modifications, e.g., 5′-end modifications (phosphorylation, conjugation, inverted linkages) or 3′-end modifications (conjugation, DNA nucleotides, inverted linkages, etc.); base modifications, e.g., replacement with stabilizing bases, destabilizing bases, or bases that base pair with an expanded repertoire of partners, removal of bases (abasic nucleotides), or conjugated bases; sugar modifications (e.g., at the 2′-position or 4′-position) or replacement of the sugar; and/or backbone modifications, including modification or replacement of the phosphodiester linkages. The nucleobase may also be an isonucleoside in which the nucleobase is moved from the C1 position of the sugar moiety to a different position (e.g. C2, C3, C4, or C5). Specific examples of oligonucleotide compounds useful in the embodiments described herein include, but are not limited to, alternative nucleosides containing modified backbones or no natural internucleoside linkages. Nucleotides and nucleosides having modified backbones include, among others, those that do not have a phosphorus atom in the backbone. For the purposes of this specification, and as sometimes referenced in the art, alternative RNAs that do not have a phosphorus atom in their internucleoside backbone can also be considered to be oligonucleosides. In some embodiments, an oligonucleotide will have a phosphorus atom in its internucleoside backbone.

[0184] Alternative Internucleoside Linkages

[0185] Alternative internucleoside linkages, also referred to as modified internucleoside linkages, include, for example, phosphorothioates, chiral phosphorothioates, 2′-alkoxy internucleoside linkages, alkyl phosphate internucleoside linkages, methylphosphonates, phosphorodithioates, phosphotriesters, aminoalkylphosphotriesters, methyl and other alkyl phosphonates including 3′-alkylene phosphonates and chiral phosphonates, morpholinos, PNAs, phosphinates, phosphoramidates including 3′-amino phosphoramidate and aminoalkylphosphoramidates, thionophosphoramidates, alkylphosphonates, methylphosphonates, dimethylphosphonates, thionoalkylphosphonates, thionoalkylphosphotriesters, phosphorodiamidates, thiophosphoramidates, thiophosphates, selenophosphates, and boranophosphates having normal 3′-5′ linkages, 2′-5′-linked analogs of these, and those having inverted polarity wherein the adjacent pairs of nucleoside units are linked 3′-5′ to 5′-3′ or 2′-5′ to 5′-2′. Various salts, mixed salts, and free acid forms are also included.

[0186] In various embodiments, oligonucleotides having modified internucleoside linkages include internucleoside linkages that retain a phosphorus atom as well as internucleoside linkages that do not have a phosphorus atom. Representative phosphorus containing internucleoside linkages include, but are not limited to, phosphodiesters, phosphotriesters, methylphosphonates, phosphoramidate, and phosphorothioates. Methods of preparation of phosphorous-containing and non-phosphorous-containing linkages are well known.

[0187] Representative U.S. patents that teach the preparation of the above phosphorus-containing linkages include, but are not limited to, U.S. Pat. Nos. 3,687,808; 4,469,863; 4,476,301; 5,023,243; 5,177,195; 5,188,897; 5,264,423; 5,276,019; 5,278,302; 5,286,717; 5,321,131; 5,399,676; 5,405,939; 5,453,496; 5,455,233; 5,466,677; 5,476,925; 5,519,126; 5,536,821; 5,541,316; 5,550,111; 5,563,253; 5,571,799; 5,587,361; 5,625,050; 6,028,188; 6,124,445; 6,160,109; 6,169,170; 6,172,209; 6,239,265; 6,277,603; 6,326,199; 6,346,614; 6,444,423; 6,531,590; 6,534,639; 6,608,035; 6,683,167; 6,858,715; 6,867,294; 6,878,805; 7,015,315; 7,041,816; 7,273,933; 7,321,029; and U.S. Pat. RE39464, the entire contents of each of which are hereby incorporated herein by reference.

[0188] Alternative internucleoside linkages that do not include a phosphorus atom therein have backbones that are formed by short chain alkyl or cycloalkyl internucleoside linkages, mixed heteroatoms and alkyl or cycloalkyl internucleoside linkages, or one or more short chain heteroatomic or heterocyclic internucleoside linkages. These include those having morpholino linkages (formed in part from the sugar portion of a nucleoside); siloxane backbones; sulfide, sulfoxide and sulfone backbones; formacetyl and thioformacetyl backbones; methylene formacetyl and thioformacetyl backbones; alkene containing backbones; sulfamate backbones; methyleneimino and methylenehydrazino backbones; sulfonate and sulfonamide backbones; amide backbones; and others having mixed N, O, S, and CH₂ component parts.

[0189] In some embodiments, the oligonucleotide may be defined by its pattern of backbone chiral centers. For example, a phophorothioate internucleoside linkage may be an R or S enantiomer. Each internucleoside linkage may thus be defined as Rp or Sp such that the entire stereochemistry of the backbone is chirally defined, e.g., as described in the International Publication No. WO 2015/107425, which is hereby incorporated by reference in its entirety. In some embodiments, only specific internucleoside linkages of the oligonucleotide (e.g., a plurality of the oligonucleotides) contain a chiral center. In other embodiments, the oligonucleotide (e.g., a plurality of the oligonucleotides) includes a mix of stereorandom and stereospecific chiral centers.

[0190] Representative U.S. patents that teach the preparation of the above oligonucleosides include, but are not limited to, U.S. Pat. Nos. 5,034,506; 5,166,315; 5,185,444; 5,214,134; 5,216,141; 5,235,033; 5,64,562; 5,264,564; 5,405,938; 5,434,257; 5,466,677; 5,470,967; 5,489,677; 5,541,307; 5,561,225; 5,596,086; 5,602,240; 5,608,046; 5,610,289; 5,618,704; 5,623,070; 5,663,312; 5,633,360; 5,677,437; and, 5,677,439, the entire contents of each of which are hereby incorporated herein by reference.

[0191] In other embodiments, suitable oligonucleotides include those in which both the sugar and the internucleoside linkage, i.e., the backbone, of the nucleotide units are replaced. The base units are maintained for hybridization with an appropriate nucleic acid target compound. One such oligomeric compound, a mimetic that has been shown to have excellent hybridization properties, is referred to as a peptide nucleic acid (PNA). In PNA compounds, the sugar of a nucleoside is replaced with an amide containing backbone, in particular an aminoethylglycine backbone. The nucleobases are retained and are bound directly or indirectly to aza nitrogen atoms of the amide portion of the backbone. Representative U.S. patents that teach the preparation of PNA compounds include, but are not limited to, U.S. Pat. Nos. 5,539,082; 5,714,331; and 5,719,262, the entire contents of each of which are hereby incorporated herein by reference. Additional PNA compounds suitable for use in the oligonucleotides of the invention are described in, for example, in Nielsen et al., Science, 1991, 254, 1497-1500.

[0192] Some embodiments featured in the invention include oligonucleotides with phosphorothioate backbones and oligonucleotides with heteroatom backbones, and in particular —CH₂—NH—CH₂—, —CH₂—N(CH₃)—O—CH₂-[known as a methylene (methylimino) or MMI backbone], —CH₂—O—N(CH₃)—CH₂—, —CH₂—N(CH₃)—N(CH₃)—CH₂— and —N(CH₃)—CH₂—CH₂-[wherein the native phosphodiester backbone is represented as —O—P—O—CH₂-] of the above-referenced U.S. Pat. No. 5,489,677, and the amide backbones of the above-referenced U.S. Pat. No. 5,602,240. In some embodiments, the oligonucleotides featured herein have morpholino backbone structures of the above-referenced U.S. Pat. No. 5,034,506. In other embodiments, the oligonucleotides described herein include phosphorodiamidate morpholino oligomers (PMO), in which the deoxyribose moiety is replaced by a morpholine ring, and the charged phosphodiester inter-subunit linkage is replaced by an uncharged phophorodiamidate linkage, as described in Summerton, et al., Antisense Nucleic Acid Drug Dev. 1997, 7:63-70.

[0193] Alternative Sugar Moeities

[0194] Alternative nucleosides and nucleotides can also contain one or more substituted and/or modified sugar moieties. In some embodiments, oligonucleotides comprise modified sugar moeities, such as any one of a 2′-O-methyl (2′OMe) moeity, a 2′-O-methoxyethyl moeity, a bicyclic sugar moeity, PNA (e.g., an oligonucleotide comprising one or more N-(2-aminoethyl)-glycine units linked by amide bonds or carbonyl methylene linkage as repeating units in place of a sugar-phosphate backbone), locked nucleoside (LNA) (e.g., an oligonucleotide comprising one or more locked ribose, and can be a mixture of 2′-deoxy nucleotides or 2′OMe nucleotides), c-ET (e.g., an oligonucleotide comprising one or more cET sugar), cMOE (e.g., an oligonucleotide comprising one or more cMOE sugar), morpholino oligomer (e.g., an oligonucleotide comprising a backbone comprising one or more phosphorodiamidate morpholiono oligomers), 2′-deoxy-2′-fluoro nucleoside (e.g., an oligonucleotide comprising one or more 2′-fluoro-β-D-arabinonucleoside), tcDNA (e.g., an oligonucleotide comprising one or more tcDNA modified sugar), constrained ethyl 2′-4′-bridged nucleic acid (cEt), S-cEt, ethylene bridged nucleic acid (ENA) (e.g., an oligonucleotide comprising one or more ENA modified sugar), hexitol nucleic acids (HNA) (e.g., an oligonucleotide comprising one or more HNA modified sugar), or tricyclic analog (tcDNA) (e.g., an oligonucloetide comprising one or more tcDNA modified sugar).

[0195] The oligonucleotides, e.g., oligonucleotides, featured herein can include one of the following at the 2′-position: OH; F; O-, S-, or N-alkyl; O-, S-, or N-alkenyl; O-, S- or N-alkynyl; or O-alkyl-O-alkyl, wherein the alkyl, alkenyl and alkynyl can be substituted or unsubstituted C₁ to C₁₀ alkyl or C2 to C₁₀ alkenyl and alkynyl. Exemplary suitable modifications include —O[(CH₂)ₙO]ₘCH₃, —O(CH₂), OCH₃, —O(CH₂)ₙ—NH₂, —O(CH₂), CH₃, —O(CH₂)ₙ—ONH₂, and —O(CH₂)ₙ—ON[(CH₂)ₙCH₃]₂, where n and m are from 1 to about 10. In other embodiments, oligonucleotides include one of the following at the 2′ position: C₁ to C₁₀ lower alkyl, substituted lower alkyl, alkaryl, aralkyl, O-alkaryl or O-aralkyl, SH, SCH₃, OCN, Cl, Br, CN, CF₃, OCF₃, SOCH₃, SO₂CH₃, ONO₂, NO₂, N₃, NH₂, heterocycloalkyl, heterocycloalkaryl, aminoalkylamino, polyalkylamino, substituted silyl, an RNA cleaving group, a reporter group, an intercalator, a group for improving the pharmacokinetic properties of an oligonucleotide, or a group for improving the pharmacodynamic properties of an oligonucleotide, and other substituents having similar properties. In some embodiments, the modification includes a 2′-methoxyethoxy (2′-O—CH₂CH₂OCH₃, also known as 2′-O-(2-methoxyethyl) or 2′-MOE) (Martin et al., Helv. Chin. Acta, 1995, 78:486-504) i.e., an alkoxy-alkoxy group. MOE nucleosides confer several beneficial properties to oligonucleotides including, but not limited to, increased nuclease resistance, improved pharmacokinetics properties, reduced non-specific protein binding, reduced toxicity, reduced immunostimulatory properties, and enhanced target affinity as compared to unmodified oligonucleotides.

[0196] Another exemplary alternative contains 2′-dimethylaminooxyethoxy, i.e., a —O(CH₂)₂ON(CH₃)₂ group, also known as 2′-DMAOE, as described in examples herein below, and 2′-dimethylaminoethoxyethoxy (also known in the art as 2′-O-dimethylaminoethoxyethyl or 2′-DMAEOE), i.e., 2′-O—(CH₂)₂—O—(CH₂)₂—N(CH₃)₂. Further exemplary alternatives include: 5′-Me-2′-F nucleotides, 5′-Me-2′-OMe nucleotides, 5′-Me-2′-deoxynucleotides, (both R and S isomers in these three families); 2′-alkoxyalkyl; and 2′-NMA (N-methylacetamide).

[0197] Other alternatives include 2′-methoxy (2′-OCH₃), 2′-aminopropoxy (2′-OCH₂CH₂CH₂NH₂) and 2′-fluoro (2′-F). Similar modifications can also be made at other positions on the nucleosides and nucleotides of an oligonucleotide, particularly the 3′ position of the sugar on the 3′ terminal nucleotide or in 2′-5′ linked oligonucleotides and the 5′ position of 5′ terminal nucleotide. Oligonucleotides can also have sugar mimetics such as cyclobutyl moieties in place of the pentofuranosyl sugar. Representative U.S. patents that teach the preparation of such modified sugar structures include, but are not limited to, U.S. Pat. Nos. 4,981,957; 5,118,800; 5,319,080; 5,359,044; 5,393,878; 5,446,137; 5,466,786; 5,514,785; 5,519,134; 5,567,811; 5,576,427; 5,591,722; 5,597,909; 5,610,300; 5,627,053; 5,639,873; 5,646,265; 5,658,873; 5,670,633; and 5,700,920, certain of which are commonly owned with the instant application. The entire contents of each of the foregoing are hereby incorporated herein by reference.

[0198] In some embodiments, the sugar moiety in the nucleotide may be a ribose molecule, optionally having a 2′-O-methyl, 2′-O-MOE, 2′-F, 2′-amino, 2′-O-propyl, 2′-aminopropyl, or 2′-OH modification.

[0199] An oligonucleotide of the invention can include one or more bicyclic sugar moieties. A “bicyclic sugar” is a furanosyl ring modified by the bridging of two atoms. A “bicyclic nucleoside” (“BNA”) is a nucleoside having a sugar moiety comprising a bridge connecting two carbon atoms of the sugar ring, thereby forming a bicyclic ring system. In certain embodiments, the bridge connects the 4′-carbon and the 2′-carbon of the sugar ring. In some embodiments, the bicyclic sugar comprises a 4′-CH(R)—O-2′ bridge wherein R is, independently, H, C₁-C₁₂ alkyl, or a protecting group. In some embodiments, R is methyl. In some embodiments, R is H.

[0200] In some embodiments an agent of the invention may include one or more locked nucleosides. A locked nucleoside is a nucleoside having a modified ribose moiety in which the ribose moiety comprises an extra bridge connecting the 2′ and 4′ carbons. In other words, a locked nucleoside is a nucleoside comprising a bicyclic sugar moiety comprising a 4′-CH₂—O-2′ bridge. This structure effectively “locks” the ribose in the 3′-endo structural conformation. The addition of locked nucleosides to oligonucleotides has been shown to increase oligonucleotide stability in serum, and to reduce off-target effects (Grunweller, A. et al., (2003) Nucleic Acids Research 31(12):3185-3193). Examples of bicyclic nucleosides for use in the polynucleotides of the invention include without limitation nucleosides comprising a bridge between the 4′ and the 2′ ribosyl ring atoms. In certain embodiments, the polynucleotide agents of the invention include one or more bicyclic nucleosides comprising a 4′ to 2′ bridge. Examples of such 4′ to 2′ bridged bicyclic nucleosides, include but are not limited to 4′-(CH₂)—O-2′ (LNA); 4′-(CH₂)—S-2′; 4′-(CH₂)₂-O-2′ (ENA); 4′-CH(CH₃)—O-2′ (also referred to as “constrained ethyl” or “cEt”) and 4′-CH(CH₂OCH₃)—O-2′ (and analogs thereof; see, e.g., U.S. Pat. No. 7,399,845); 4′-C(CH₃)(CH₃)—O-2′ (and analogs thereof; see e.g., U.S. Pat. No. 8,278,283); 4′-CH₂—N(OCH₃)-2′ (and analogs thereof; see e.g., U.S. Pat. No. 8,278,425); 4′-CH₂—O—N(CH₃)₂-2′ (see, e.g., U.S. Patent Publication No. 2004/0171570); 4′-CH₂—N(R)—O-2′, wherein R is H, C₁-C₁₂ alkyl, or a protecting group (see, e.g., U.S. Pat. No. 7,427,672); 4′-CH₂—C(H)(CH₃)-2′ (see, e.g., Chattopadhyaya et al., J. Org. Chem., 2009, 74, 118-134); and 4′-CH₂—C(═CH₂)-2′ (and analogs thereof; see, e.g., U.S. Pat. No. 8,278,426). The entire contents of each of the foregoing are hereby incorporated herein by reference.

[0201] Additional representative U.S. Patents and US Patent Publications that teach the preparation of locked nucleic acid nucleotides include, but are not limited to, the following: U.S. Pat. Nos. 6,268,490; 6,525,191; 6,670,461; 6,770,748; 6,794,499; 6,998,484; 7,053,207; 7,034,133; 7,084,125; 7,399,845; 7,427,672; 7,569,686; 7,741,457; 8,022,193; 8,030,467; 8,278,425; 8,278,426; 8,278,283; US 2008/0039618; and US 2009/0012281, the entire contents of each of which are hereby incorporated herein by reference.

[0202] Any of the foregoing bicyclic nucleosides can be prepared having one or more stereochemical sugar configurations including for example α-L-ribofuranose and 3-D-ribofuranose (see International Publication No. WO 99/14226, contents of which are incorporated by reference herein).

[0203] An oligonucleotide of the invention can also be modified to include one or more constrained ethyl nucleosides. As used herein, a “constrained ethyl nucleoside” or “cEt” is a locked nucleoside comprising a bicyclic sugar moiety comprising a 4′-CH(CH₃)—O-2′ bridge. In one embodiment, a constrained ethyl nucleoside is in the S conformation referred to herein as “S-cEt.”

[0204] An oligonucleotide of the invention may also include one or more “conformationally restricted nucleosides” (“CRN”). CRN are nucleoside analogs with a linker connecting the C2′ and C4′ carbons of ribose or the C3 and —C5′ carbons of ribose. CRN lock the ribose ring into a stable conformation and increase the hybridization affinity to mRNA. The linker is of sufficient length to place the oxygen in an optimal position for stability and affinity resulting in less ribose ring puckering.

[0205] Representative publications that teach the preparation of certain of the above noted CRN include, but are not limited to, US Patent Publication No. 2013/0190383; and PCT publication WO 2013/036868, the entire contents of each of which are hereby incorporated herein by reference.

[0206] In some embodiments, an oligonucleotide of the invention comprises one or more monomers that are UNA (unlocked nucleoside) nucleosides. UNA is unlocked acyclic nucleoside, wherein any of the bonds of the sugar has been removed, forming an unlocked “sugar” residue. In one example, UNA also encompasses monomer with bonds between C1′-C4′ have been removed (i.e., the covalent carbon-oxygen-carbon bond between the C1′ and C4′ carbons). In another example, the C2′-C3′ bond (i.e., the covalent carbon-carbon bond between the C2′ and C3′ carbons) of the sugar has been removed (see Nuc. Acids Symp. Series, 52, 133-134 (2008) and Fluiter et al., Mol. Biosyst., 2009, 10, 1039 hereby incorporated by reference).

[0207] Representative U.S. publications that teach the preparation of UNA include, but are not limited to, U.S. Pat. No. 8,314,227; and US Patent Publication Nos. 2013/0096289; 2013/0011922; and 2011/0313020, the entire contents of each of which are hereby incorporated herein by reference.

[0208] The ribose molecule may also be modified with a cyclopropane ring to produce a tricyclodeoxynucleic acid (tricyclo DNA). The ribose moiety may be substituted for another sugar such as 1,5,-anhydrohexitol, threose to produce a threose nucleoside (TNA), or arabinose to produce an arabino nucleoside. The ribose molecule can also be replaced with non-sugars such as cyclohexene to produce cyclohexene nucleoside or glycol to produce glycol nucleosides.

[0209] Potentially stabilizing modifications to the ends of nucleoside molecules can include N-(acetylaminocaproyl)-4-hydroxyprolinol (Hyp-C6-NHAc), N-(caproyl-4-hydroxyprolinol (Hyp-C6), N-(acetyl-4-hydroxyprolinol (Hyp-NHAc), thymidine-2′-O-deoxythymidine (ether), N-(aminocaproyl)-4-hydroxyprolinol (Hyp-C6-amino), 2-docosanoyl-uridine-3″-phosphate, inverted base dT(idT) and others. Disclosure of this modification can be found in PCT Publication No. WO 2011/005861.

[0210] Other alternatives chemistries of an oligonucleotide of the invention include a 5′ phosphate or 5′ phosphate mimic, e.g., a 5′-terminal phosphate or phosphate mimic of an oligonucleotide. Suitable phosphate mimics are disclosed in, for example US Patent Publication No. 2012/0157511, the entire contents of which are incorporated herein by reference.

[0211] Alternative Nucleobases

[0212] An oligonucleotide of the invention can also include nucleobase (often referred to in the art simply as “base”) alternatives (e.g., modifications or substitutions). Unmodified or natural nucleobases include the purine bases adenine (A) and guanine (G), and the pyrimidine bases thymine (T), cytosine (C) and uracil (U). Alternative nucleobases, also referred to as modified nucleobases, include other synthetic and natural nucleobases such as 5-methylcytosine, pseudouridine, 5-methoxyuridine, 5-methylcytidine, 5-hydroxymethylcytidine, 5-formylcytidine, 5-carboxycytidine, pyrrolocytidine, dideoxycytidine, uridine, 5-methoxyuridine, 5-hydroxydeoxyuridine, dihydrouridine, 4-thiourdine, pseudouridine, 1-methyl-pseudouridine, deoxyuridine, 5-hydroxybutynl-2′-deoxyuridine, xanthine, hypoxanthine, 7-deaza-xanthine, thienoguanine, 8-aza-7-deazaguanosine, 7-methylguanosine, 7-deazaguanosine, 6-aminomethyl-7-deazaguanosine, 8-aminoguanine, 2,2,7-trimethylguanosine, 8-methyladenine, 8-azidoadenine, 7-methyladenine, 7-deazaadenine, 3-deazaadenine, 2,6-diaminopurine, 2-aminopurine, 7-deaza-8-aza-adenine, 8-amino-adenine, thymine, dideoxythymine, 5-nitroindole, 2-aminoadenine, 6-methyl and other alkyl derivatives of adenine and guanine, 2-propyl and other alkyl derivatives of adenine and guanine, 2-thiouridine, 2-thiothymine and 2-thiocytosine, 5-halouracil and cytosine, 5-propynyl uridine and cytidine, 6-azo uridine, cytidine and thymine, 4-thiouridine, 8-halo, 8-amino, 8-thiol, 8-thioalkyl, 8-hydroxyl anal other 8-substituted adenines and guanines, 5-halo, particularly 5-bromo, 5-trifluoromethyl and other 5-substituted uridines and cytidines, 8-azaguanine and 8-azaadenine, and 3-deazaguanine. Further nucleobases include those disclosed in U.S. Pat. No. 3,687,808, those disclosed in Modified Nucleosides in Biochemistry, Biotechnology and Medicine, Herdewijn, P. ed. Wiley-VCH, 2008; those disclosed in The Concise Encyclopedia Of Polymer Science And Engineering, pages 858-859, Kroschwitz, J. L, ed. John Wiley & Sons, 1990, these disclosed by Englisch et al., (1991) Angewandte Chemie, International Edition, 30:613, and those disclosed by Sanghvi, Y S., Chapter 15, Antisense Research and Applications, pages 289-302, Crooke, S. T. and Lebleu, B., Ed., CRC Press, 1993. Certain of these nucleobases are particularly useful for increasing the binding affinity of the oligomeric compounds featured in the invention. These include 5-substituted pyrimidines, 6-azapyrimidines, and N-2, N-6 and 0-6 substituted purines, including 2-aminopropyladenine, 5-propynyluracil, and 5-propynylcytosine. 5-methylcytosine substitutions have been shown to increase nucleic acid duplex stability by 0.6-1.2° C. (Sanghvi, Y. S., Crooke, S. T. and Lebleu, B., Eds., Antisense Research and Applications, CRC Press, Boca Raton, 1993, pp. 276-278) and are exemplary base substitutions, even more particularly when combined with 2′-O-methoxyethyl sugar modifications. Examples of 5-methylcytosine substitutions include 5-Methyl-2′-deoxycytosine (5-Methyl-dC) or 5-Methyl-2′-cytosine (5-Methyl-C).

[0213] Representative U.S. patents that teach the preparation of certain of the above noted alternative nucleobases as well as other alternative nucleobases include, but are not limited to, the above noted U.S. Pat. Nos. 3,687,808, 4,845,205; 5,130,30; 5,134,066; 5,175,273; 5,367,066; 5,432,272; 5,457,187; 5,459,255; 5,484,908; 5,502,177; 5,525,711; 5,552,540; 5,587,469; 5,594,121, 5,596,091; 5,614,617; 5,681,941; 5,750,692; 6,015,886; 6,147,200; 6,166,197; 6,222,025; 6,235,887; 6,380,368; 6,528,640; 6,639,062; 6,617,438; 7,045,610; 7,427,672; and 7,495,088, the entire contents of each of which are hereby incorporated herein by reference.

### Exemplary Oligonucleotides Embodiments

[0214] Exemplary oligonucleotides of the invention comprise nucleosides with alternative sugar moieties and may also comprise DNA or RNA nucleosides. In some embodiments, the oligonucleotide comprises nucleosides comprising alternative sugar moieties and DNA nucleosides. Incorporation of alternative nucleosides into the oligonucleotide of the invention may enhance the affinity of the oligonucleotide for the target nucleic acid. In that case, the alternative nucleosides can be referred to as affinity enhancing alternative nucleotides.

[0215] In some embodiments, the oligonucleotide comprises at least one alternative nucleoside, such as at least two, at least three, at least four, at least five, at least six, at least seven, at least eight, at least nine, at least ten, at least 11, at least 12, at least 13, at least 14, at least 15, at least 16, at least 17, at least 18, at least 19, or at least 20 alternative nucleosides. In other embodiments, the oligonucleotides comprise from one to ten alternative nucleosides, from two to nine alternative nucleosides, from three to eight alternative nucleosides, from four to seven alternative nucleosides (e.g., 6 or 7 alternative nucleosides). In an embodiment, the oligonucleotide of the invention may comprise alternatives, which are independently selected from these three types of alternative (alternative sugar moiety, alternative nucleobase, and alternative internucleoside linkage), or a combination thereof. In some embodiments, the oligonucleotide comprises one or more nucleosides comprising alternative sugar moieties, e.g., 2′ sugar alternative nucleosides. In some embodiments, the oligonucleotide of the invention comprise the one or more 2′ sugar alternative nucleoside independently selected from the group consisting of 2′-O-alkyl-RNA, 2′-O-methyl-RNA, 2′-alkoxy-RNA, 2′-O-methoxyethyl-RNA, 2′-amino-DNA, 2′-fluoro-DNA, arabino nucleic acid (ANA), 2′-fluoro-ANA, and BNA (e.g., LNA) nucleosides. In some embodiments, the one or more alternative nucleoside is a BNA.

[0216] In some embodiments, at least one of the alternative nucleosides is a BNA (e.g., an LNA), such as at least two, such as at least three, at least four, at least five, at least six, at least seven, or at least eight of the alternative nucleosides are BNAs. In a still further embodiment, all the alternative nucleosides are BNAs.

[0217] In a further embodiment the oligonucleotide comprises at least one alternative internucleoside linkage. In some embodiments, the internucleoside linkages within the contiguous nucleotide sequence are phosphorothioate or boranophosphate internucleoside linkages. In some embodiments, all the internucleotide linkages in the contiguous sequence of the oligonucleotide are phosphorothioate linkages. In some embodiments the phosphorothioate linkages are stereochemically pure phosphorothioate linkages. In some embodiments, the phosphorothioate linkages are Sp phosphorothioate linkages. In other embodiments, the phosphorothioate linkages are Rp phosphorothioate linkages.

[0218] In some embodiments, the oligonucleotide of the invention comprises at least one alternative nucleoside which is a 2′-MOE-RNA, such as 2, 3, 4, 5, 6, 7, 8, 9, or 10 2′-MOE-RNA nucleoside units. In some embodiments, the 2′-MOE-RNA nucleoside units are connected by phosphorothioate linkages. In some embodiments, at least one of said alternative nucleoside is 2′-fluoro DNA, such as 2, 3, 4, 5, 6, 7, 8, 9, or 10 2′-fluoro-DNA nucleoside units. In some embodiments, the oligonucleotide of the invention comprises at least one BNA unit and at least one 2′ substituted modified nucleoside. In some embodiments of the invention, the oligonucleotide comprises both 2′ sugar modified nucleosides and DNA units. In some embodiments, the oligonucleotide of the invention or contiguous nucleotide region thereof is a gapmer oligonucleotide.

### Additional Gapmer Oligonucleotide Embodiments

[0219] In some embodiments the oligonucleotide of the invention, or contiguous nucleotide region thereof, has a gapmer design or structure also referred herein merely as “gapmer.” In a gapmer structure the oligonucleotide comprises at least three distinct structural regions a 5′-wing, a gap and a 3′-wing, in ‘5->3’ orientation. In this design, the 5′ and 3′ wing regions (also termed flanking regions) comprise at least one alternative nucleoside which is adjacent to a gap region, and may in some embodiments comprise a contiguous stretch of 2, 3, 4, 5, 6, 7, 8, 9, 10, 11, or 12 alternative nucleosides, or a contiguous stretch of alternative and DNA nucleosides (mixed wings comprising both alternative and DNA nucleosides). The length of the 5′-wing region may be at least two nucleosides in length (e.g., at least at least 2, at least 3, at least 4, at least 5, or more nucleosides in length). The length of the 3′-wing region may be at least two nucleosides in length (e.g., at least 2, at least 3, at least at least 4, at least 5, or more nucleosides in length). The 5′ and 3′ wing regions may be symmetrical or asymmetrical with respect to the number of nucleosides they comprise. In some embodiments, the gap region comprises about 10 nucleosides flanked by a 5′ and a 3′ wing region each comprising about 5 nucleosides, also referred to as a 5-10-5 gapmer.

[0220] Consequently, the nucleosides of the 5′ wing region and the 3′ wing region which are adjacent to the gap region are alternative nucleosides, such as 2′ alternative nucleosides. The gap region comprises a contiguous stretch of nucleotides which are capable of recruiting RNase H, when the oligonucleotide is in duplex with the KCNT1 target nucleic acid. In some embodiments, the gap segment comprising one or more of linked deoxyribonucleosides, 2′-Fluoro Arabino Nucleic Acids (FANA), and Fluoro Cyclohexenyl nucleic acid (F-CeNA). In some embodiments, the gap region comprises a contiguous stretch of 5-16 DNA nucleosides. In some embodiments, the gap region comprises a contiguous stretch of 6-15, 7-14, 8-13, or 9-11 DNA nucleosides. In some embodiments, the gap region comprises a contiguous stretch of at least 8, at least 9, at least 10, at least 11, at least 12, at least 13, at least 14, at least 15, at least 16, at least 17, at least 18, at least 19, or at least 20 DNA nucleosides. In some embodiments, the gap region comprises a region of at least at least 8, at least 9, at least 10, at least 11, at least 12, at least 13, at least 14, at least 15, at least 16, at least 17, at least 18, at least 19, or at least 20 contiguous nucleobases having at least 80% (e.g., at least 85%, at least 86%, at least 87%, at least 88%, at least 89%, at least 90%, at least 91%, at least 92%, at least 93%, at least 94%, at least 95%, at least 96%, at least 97%, at least 98%, or at least 99%) complementarity to a KCNT1 transcript (e.g., SEQ ID NO: 3526) or KCNT1 transcript variant. In some embodiments, the gapmer comprises a region complementary to at least 17 contiguous nucleotides, 19-23 contiguous nucleotides, or 19 contiguous nucleotides of a KCNT1 transcript (e.g., SEQ ID NO: 3526) or KCNT1 transcript variant. The gapmer is complementary to the KCNT1 target nucleic acid (KCNT1 transcript (e.g., SEQ ID NO: 3526) or KCNT1 transcript variant), and may therefore be the contiguous nucleoside region of the oligonucleotide. In some embodiments, the gap region comprises a region of at least 8, at least 9, at least 10, at least 11, at least 12, at least 13, at least 14, at least 15, at least 16, at least 17, at least 18, at least 19, or at least 20 contiguous nucleobases having at least 80% (e.g., at least 85%, at least 86%, at least 87%, at least 88%, at least 89%, at least 90%, at least 91%, at least 92%, at least 93%, at least 94%, at least 95%, at least 96%, at least 97%, at least 98%, or at least 99%) identity to an equal length portion of any one of SEQ ID NOs: 1-3525.

[0221] The 5′ and 3′ wing regions, flanking the 5′ and 3′ ends of the gap region, may comprise one or more affinity enhancing alternative nucleosides. In some embodiments, the 5′ and/or 3′ wing comprises at least one 2′-O-methoxyethyl (MOE) nucleoside, for example at least two MOE nucleosides. In some embodiments, the 5′ wing comprises at least one MOE nucleoside. In some embodiments both the 5′ and 3′ wing regions comprise a MOE nucleoside. In some embodiments all the nucleosides in the wing regions are MOE nucleosides. In other embodiments, the wing regions may comprise both MOE nucleosides and other nucleosides (mixed wings), such as DNA nucleosides and/or non-MOE alternative nucleosides, such as bicyclic nucleosides (BNAs) (e.g., LNA nucleosides or cET nucleosides), or other 2′ substituted nucleosides. In this case the gap is defined as a contiguous sequence of at least 5 RNase H recruiting nucleosides (such as 5-16 DNA nucleosides) flanked at the 5′ and 3′ end by an affinity enhancing alternative nucleoside, such as an MOE nucleoside.

[0222] In other embodiments, the 5′ and/or 3′ wing comprises at least one BNA (e.g., at least one LNA nucleoside or cET nucleoside), for example at least 2 bicyclic nucleosides. In some embodiments, the 5′ wing comprises at least one BNA. In some embodiments both the 5′ and 3′ wing regions comprise a BNA. In some embodiments all the nucleosides in the wing regions are BNAs. In other embodiments, the wing regions may comprise both BNAs and other nucleosides (mixed wings), such as DNA nucleosides and/or non-BNA alternative nucleosides, such as 2′ substituted nucleosides. In this case the gap is defined as a contiguous sequence of at least five RNase H recruiting nucleosides (such as 5-16 DNA nucleosides) flanked at the 5′ and 3′ end by an affinity enhancing alternative nucleoside, such as a BNA, such as an LNA, such as beta-D-oxy-LNA.

[0223] The 5′ flank or 5′ wing attached to the 5′ end of the gap region comprises, contains, or consists of at least one alternative sugar moiety (e.g., at least three, at least four, at least five, at least six, at least seven, or more alternative sugar moieties). In some embodiments the wing region comprises or consists of from 1 to 7 alternative nucleobases, such as from two to six alternative nucleobases, from two to five alternative nucleobases, from two to four alternative nucleobases, or from one to three alternative nucleobases (e.g., one, two, three or four alternative nucleobases). In some embodiments, the wing region comprises or consists of at least one alternative internucleoside linkage (e.g., at least three, at least four, at least five, at least six, at least seven, or more alternative internucleoside linkages).

[0224] In some embodiments, the 3′ flank or 3′ wing attached to the 3′ end of the gap region comprises, contains, or consists of at least one alternative sugar moiety (e.g., at least three, at least four, at least five, at least six, at least seven, or more alternative sugar moieties). In some embodiments the wing region comprises or consists of from one to seven alternative nucleobases, such as from two to six alternative nucleobases, from two to five alternative nucleobases, from two to four alternative nucleobases, or from one to three alternative nucleobases (e.g., two, three, or four alternative nucleobases). In some embodiments, the wing region comprises or consists of at least one alternative internucleoside linkage (e.g., at least three, at least four, at least five, at least six, at least seven, or more alternative internucleoside linkages).

[0225] In an embodiment, one or more or all of the alternative sugar moieties in the wing regions are 2′ alternative sugar moieties.

[0226] In a further embodiment, one or more of the 2′ alternative sugar moieties in the wing regions are selected from 2′-O-alkyl-sugar moieties, 2′-O-methyl-sugar moieties, 2′-amino-sugar moieties, 2′-fluoro-sugar moieties, 2′-alkoxy-sugar moieties, MOE sugar moieties, LNA sugar moieties, arabino nucleic acid (ANA) sugar moieties, and 2′-fluoro-ANA sugar moieties.

[0227] In one embodiment of the invention all the alternative nucleosides in the wing regions are bicyclic nucleosides. In a further embodiment the bicyclic nucleosides in the wing regions are independently selected from the group consisting of oxy-LNA, thio-LNA, amino-LNA, cET, and/or ENA, in either the beta-D or alpha-L configurations or combinations thereof.

[0228] In some embodiments, the one or more alternative internucleoside linkages in the wing regions are phosphorothioate internucleoside linkages. In some embodiments, the phosphorothioate linkages are stereochemically pure phosphorothioate linkages. In some embodiments the phosphorothioate linkages are Sp phosphorothioate linkages. In other embodiments, the phosphorothioate linkages are Rp phosphorothioate linkages. In some embodiments the phosphorothioate linkages are mixed stero-enriched (e.g., Sp-Rp-Sp or Rp-Sp-Rp) phosphorothioate linkages. In some embodiments, the alternative internucleoside linkages are 2′-alkoxy internucleoside linkages. In other embodiments, the alternative internucleoside linkages are alkyl phosphate internucleoside linkages.

[0229] The gap region may comprise, contain, or consist of at least 5-16 consecutive DNA nucleosides capable of recruiting RNase H. In some embodiments, all of the nucleosides of the gap region are DNA units. In further embodiments the gap region may consist of a mixture of DNA and other nucleosides capable of mediating RNase H cleavage. In some embodiments, at least 50% of the nucleosides of the gap region are DNA, such as at least 60%, at least 65%, at least 70%, at least 75%, at least 80%, at least 85%, at least 90%, at least 95%, or 100% DNA.

[0230] The oligonucleotide of the invention comprises a contiguous region which is complementary to the target nucleic acid. In some embodiments, the oligonucleotide may further comprise additional linked nucleosides positioned 5′ and/or 3′ to either the 5′ and 3′ wing regions. These additional linked nucleosides can be attached to the 5′ end of the 5′ wing region or the 3′ end of the 3′ wing region, respectively. The additional nucleosides may, in some embodiments, form part of the contiguous sequence, which is complementary to the target nucleic acid, or in other embodiments, may be non-complementary to the target nucleic acid.

[0231] The inclusion of the additional nucleosides at either, or both of the 5′ and 3′ wing regions may independently comprise one, two, three, four, or five additional nucleotides, which may be complementary or non-complementary to the target nucleic acid. In this respect the oligonucleotide of the invention, may in some embodiments comprise a contiguous sequence capable of modulating the target which is flanked at the 5′ and/or 3′ end by additional nucleotides. Such additional nucleosides may serve as a nuclease susceptible biocleavable linker and may therefore be used to attach a functional group such as a conjugate moiety to the oligonucleotide of the invention. In some embodiments the additional 5′ and/or 3′ end nucleosides are linked with phosphodiester linkages and may be DNA or RNA. In another embodiment, the additional 5′ and/or 3′ end nucleosides are alternative nucleosides which may for example be included to enhance nuclease stability or for ease of synthesis.

[0232] In other embodiments, the oligonucleotides of the invention utilize “altimer” design and comprise alternating 2′-fluoro-ANA and DNA regions that are alternated every three nucleosides. Altimer oligonucleotides are discussed in more detail in Min, et al., Bioorganic & Medicinal Chemistry Letters, 2002, 12(18): 2651-2654 and Kalota, et al., Nuc. Acid Res. 2006, 34(2): 451-61 (herein incorporated by reference).

[0233] In other embodiments, the oligonucleotides of the invention utilize “hemimer” design and comprise a single 2′-modified wing segment adjacent to (on either side of the 5′ or the 3′ side of) a gap region. Hemimer oligonucleotides are discussed in more detail in Geary et al., 2001, J. Pharm. Exp. Therap., 296: 898-904 (herein incorporated by reference).

[0234] In various embodiments, the oligonucleotide comprises a 5′ wing region, a 3′ wing region, and a gap region between the 5′ and 3′ wing regions. In some embodiments, the gap region comprises a contiguous stretch of 2, 3, 4, 5, 6, 7, 8, 9, 10, 11, 12, 13, 14, 15, 16, 17, 18, 19, or 20 DNA nucleosides. In some embodiments, the gap region comprises a contiguous stretch of 8, 10, or 12 DNA nucleosides. In various embodiments, the 5′ and 3′ wing regions comprise one or more affinity enhancing alternative nucleosides, such as one or more 2′-O-methoxyethyl (MOE) nucleosides. In some embodiments, the 5′ wing region comprises one, two, three, four, five, or six 2′-O-MOE nucleosides. In particular embodiments, the 5′ wing region comprises either two or five 2′-O-MOE nucleosides. In some embodiments, the 5′ wing region comprises one, two, three, four, five, or six locked nucleosides (LNAs). In particular embodiments, the 5′ wing region comprises two LNAs. In some embodiments, the 5′ wing region comprises two 2′-O-MOE nucleosides and two LNAs.

[0235] In some embodiments, the 3′ wing region comprises one, two, three, four, five, or six 2′-O-MOE nucleosides. In particular embodiments, the 3′ wing region comprises either three or five MOE nucleosides. In some embodiments, the 3′ wing region comprises one, two, three, four, five, or six locked nucleosides (LNAs). In particular embodiments, the 3′ wing region comprises two LNAs. In some embodiments, the 3′ wing region comprises three MOE nucleosides and two LNAs.

[0236] In various embodiments, one or more internucleoside linkages of the oligonucleotide are naturally occurring linkages (e.g., phosphodiester bonds). In some embodiments, all of the internucleoside linkages of the oligonucleotide are naturally occurring linkages (e.g., phosphodiester bonds). In various embodiments, one or more internucleoside linkages of the oligonucleotide are alternative linkages (e.g., phosphorothioate linkages). In some embodiments, at least one, two, three, four, five, six, seven, eight, nine, or ten internucleoside linkages are phosphorothioate linkages. In various embodiments, the oligonucleotide includes both phosphodiester bonds and phosphorothioate linkages. In some embodiments, the gap region of the oligonucleotide comprises phosphodiester bonds and the 5′ wing region and 3′ wing region each comprises one or more phosphorothioate linkages.

[0237] In various embodiments, the oligonucleotide includes one or more unmodified cytosines. In some embodiments, all of the cytosines in the oligonucleotide are unmodified. In various embodiments, the oligonucleotide includes one or more modified cytosines. An example of a modified cytosine is a 5-Methyl-2′-deoxycytosine (5-Methyl-dC) or 5-Methyl-2′-cytosine (5-Methyl-C). In some embodiments, all cytosines of the oligonucleotide are 5-Methyl-2′-deoxycytosine. In some embodiments, all cytosines in the gap region of the oligonucleotide are 5-Methyl-2′-deoxycytosine and all cytosines in the 5′ wing region and 3′ wing region are 5-Methyl-C.

[0238] In one embodiment, the oligonucleotide has a chemically modified nucleobase sequence of eeeee-d10-eeeee (where “e” denotes a 2′-O-MOE modified nucleoside and where “d10” denotes a contiguous 10 DNA nucleobase sequence). In this embodiment, the 5′ wing region includes five 2′-O-MOE modified nucleosides, the gap region includes 10 contiguous DNA nucleobases, and the 3′ wing region includes five 2′-O-MOE modified nucleosides. The internucleoside linkages connecting the nucleobases can be phosphodiester bonds. In one embodiment, the oligonucleotide includes unmodified cytidines. In another embodiment, the oligonucleotide includes modified cytidines (e.g., 5-Methyl-dC and/or 5-Methyl-C).

[0239] In one embodiment, the oligonucleotide has a chemically modified nucleobase sequence of eeeee-d12-eeeee. In this embodiment, the 5′ wing region includes five 2′-O-MOE modified nucleosides, the gap region includes 12 contiguous DNA nucleobases, and the 3′ wing region includes five 2′-O-MOE modified nucleosides. The internucleoside linkages connecting the nucleobases can be phosphodiester bonds. The oligonucleotide includes unmodified cytidines.

[0240] In one embodiment, the oligonucleotide has a chemically modified nucleobase sequence of eeeee-d8-eeeee. In this embodiment, the 5′ wing region includes five 2′-O-MOE modified nucleosides, the gap region includes 8 contiguous DNA nucleobases, and the 3′ wing region includes five 2′-O-MOE modified nucleosides. The internucleoside linkages connecting the nucleobases can be as follows: sooosssssssssooss (where “s” refers to a phoshphorothiorate bond and “o” refers to a phosphodiester bond). The oligonucleotide includes unmodified cytidines.

[0241] In one embodiment, the oligonucleotide has a chemically modified nucleobase sequence of eekk-d8-kkeee (where “e” denotes a 2′-O-MOE modified nucleoside, “d8” denotes a contiguous 8 DNA nucleobase sequence, and “k” denotes a locked nucleic acid (LNA), constrained methoxyethyl (cMOE) nucleoside, constrained ethyl (cET) nucleoside, or peptide nucleic acid (PNA). In this embodiment, the 5′ wing region includes two 2′-O-MOE modified nucleosides and two LNAs, the gap region includes 8 contiguous DNA nucleobases, and the 3′ wing region includes two LNAs and three 2′-O-MOE modified nucleosides. The internucleoside linkages connecting the nucleobases can be as follows: soosssssssssooss (where “s” refers to a phoshphorothiorate bond and “o” refers to a phosphodiester bond). The oligonucleotide includes unmodified cytidines.

[0242] Oligonucleotides Conjugated to Ligands

[0243] Oligonucleotides of the invention may be chemically linked to one or more ligands, moieties, or conjugates that enhance the activity, cellular distribution, or cellular uptake of the oligonucleotide. Such moieties include but are not limited to lipid moieties such as a cholesterol moiety (Letsinger et al., (1989) Proc. Natl. Acid. Sci. USA, 86: 6553-6556), cholic acid (Manoharan et al., (1994) Biorg. Med. Chem. Let., 4:1053-1060), a thioether, e.g., beryl-S-tritylthiol (Manoharan et al., (1992) Ann. N.Y. Acad. Sci., 660:306-309; Manoharan et al., (1993) Biorg. Med. Chem. Let., 3:2765-2770), a thiocholesterol (Oberhauser et al., (1992) Nucl. Acids Res., 20:533-538), an aliphatic chain, e.g., dodecandiol or undecyl residues (Saison-Behmoaras et al., (1991) EMBO J, 10:1111-1118; Kabanov et al., (1990) FEBS Lett., 259:327-330; Svinarchuk et al., (1993) Biochimie, 75:49-54), a phospholipid, e.g., di-hexadecyl-rac-glycerol or triethyl-ammonium 1,2-di-O-hexadecyl-rac-glycero-3-phosphonate (Manoharan et al., (1995) Tetrahedron Lett., 36:3651-3654; Shea et al., (1990) Nucl. Acids Res., 18:3777-3783), a polyamine or a polyethylene glycol chain (Manoharan et al., (1995) Nucleosides & Nucleotides, 14:969-973), or adamantane acetic acid (Manoharan et al., (1995) Tetrahedron Lett., 36:3651-3654), a palmityl moiety (Mishra et al., (1995) Biochim. Biophys. Acta, 1264:229-237), or an octadecylamine or hexylamino-carbonyloxycholesterol moiety (Crooke et al., (1996) J. Pharmacol. Exp. Ther., 277:923-937).

[0244] In one embodiment, a ligand alters the distribution, targeting, or lifetime of an oligonucleotide agent into which it is incorporated. In some embodiments, a ligand provides an enhanced affinity for a selected target, e.g., molecule, cell or cell type, compartment, e.g., a cellular or organ compartment, tissue, organ, or region of the body, as, e.g., compared to a species absent such a ligand.

[0245] Ligands can include a naturally occurring substance, such as a protein (e.g., human serum albumin (HSA), low-density lipoprotein (LDL), or globulin); carbohydrate (e.g., a dextran, pullulan, chitin, chitosan, inulin, cyclodextrin, N-acetylglucosamine, N-acetylgalactosamine, or hyaluronic acid); or a lipid. The ligand can also be a recombinant or synthetic molecule, such as a synthetic polymer, e.g., a synthetic polyamino acid. Examples of polyamino acids include polyamino acid is a polylysine (PLL), poly L-aspartic acid, poly L-glutamic acid, styrene-maleic acid anhydride copolymer, poly(L-lactide-co-glycolied) copolymer, divinyl ether-maleic anhydride copolymer, N-(2-hydroxypropyl)methacrylamide copolymer (HMPA), polyethylene glycol (PEG), polyvinyl alcohol (PVA), polyurethane, poly(2-ethylacryllic acid), N-isopropylacrylamide polymers, or polyphosphazine. Example of polyamines include: polyethylenimine, polylysine (PLL), spermine, spermidine, polyamine, pseudopeptide-polyamine, peptidomimetic polyamine, dendrimer polyamine, arginine, amidine, protamine, cationic lipid, cationic porphyrin, quaternary salt of a polyamine, or an alpha helical peptide.

[0246] Ligands can also include targeting groups, e.g., a cell or tissue targeting agent, e.g., a lectin, glycoprotein, lipid or protein, e.g., an antibody, that binds to a specified cell type such as a kidney cell. A targeting group can be a thyrotropin, melanotropin, lectin, glycoprotein, surfactant protein A, Mucin carbohydrate, multivalent lactose, multivalent galactose, N-acetyl-galactosamine, N-acetyl-gulucosamine multivalent mannose, multivalent fucose, glycosylated polyaminoacids, multivalent galactose, transferrin, bisphosphonate, polyglutamate, polyaspartate, a lipid, cholesterol, a steroid, bile acid, folate, vitamin B12, vitamin A, biotin, or an RGD peptide or RGD peptide mimetic.

[0247] Other examples of ligands include dyes, intercalating agents (e.g. acridines), cross-linkers (e.g. psoralen, mitomycin C), porphyrins (TPPC4, texaphyrin, Sapphyrin), polycyclic aromatic hydrocarbons (e.g., phenazine, dihydrophenazine), artificial endonucleases (e.g. EDTA), lipophilic molecules, e.g., cholesterol, cholic acid, adamantane acetic acid, 1-pyrene butyric acid, dihydrotestosterone, 1,3-Bis-O(hexadecyl)glycerol, geranyloxyhexyl group, hexadecylglycerol, borneol, menthol, 1,3-propanediol, heptadecyl group, palmitic acid, myristic acid,O3-(oleoyl)lithocholic acid, O3-(oleoyl)cholenic acid, dimethoxytrityl, or phenoxazine) and peptide conjugates (e.g., antennapedia peptide, Tat peptide), alkylating agents, phosphate, amino, mercapto, PEG (e.g., PEG-40K), MPEG, [MPEG]₂, polyamino, alkyl, substituted alkyl, radiolabeled markers, enzymes, haptens (e.g. biotin), transport/absorption facilitators (e.g., aspirin, vitamin E, folic acid), synthetic ribonucleases (e.g., imidazole, bisimidazole, histamine, imidazole clusters, acridine-imidazole conjugates, Eu3+ complexes of tetraazamacrocycles), dinitrophenyl, HRP, or AP.

[0248] Ligands can be proteins, e.g., glycoproteins, or peptides, e.g., molecules having a specific affinity for a co-ligand, or antibodies e.g., an antibody, that binds to a specified cell type such as a hepatic cell. Ligands can also include hormones and hormone receptors. They can also include non-peptidic species, such as lipids, lectins, carbohydrates, vitamins, cofactors, multivalent lactose, multivalent galactose, N-acetyl-galactosamine, N-acetyl-gulucosamine multivalent mannose, or multivalent fucose.

[0249] The ligand can be a substance, e.g., a drug, which can increase the uptake of the oligonucleotide agent into the cell, for example, by disrupting the cell's cytoskeleton, e.g., by disrupting the cell's microtubules, microfilaments, and/or intermediate filaments. The drug can be, for example, taxon, vincristine, vinblastine, cytochalasin, nocodazole, japlakinolide, latrunculin A, phalloidin, swinholide A, indanocine, or myoservin.

[0250] In some embodiments, a ligand attached to an oligonucleotide as described herein acts as a pharmacokinetic modulator (PK modulator). PK modulators include lipophiles, bile acids, steroids, phospholipid analogues, peptides, protein binding agents, PEG, vitamins etc. Exemplary PK modulators include, but are not limited to, cholesterol, fatty acids, cholic acid, lithocholic acid, dialkylglycerides, diacylglyceride, phospholipids, sphingolipids, naproxen, ibuprofen, vitamin E, biotin etc. Oligonucleotides that comprise a number of phosphorothioate linkages are also known to bind to serum protein, thus short oligonucleotides, e.g., oligonucleotides of about 5 bases, 10 bases, 15 bases, or 20 bases, comprising multiple of phosphorothioate linkages in the backbone are also amenable to the present invention as ligands (e.g. as PK modulating ligands). In addition, aptamers that bind serum components (e.g. serum proteins) are also suitable for use as PK modulating ligands in the embodiments described herein.

[0251] Ligand-conjugated oligonucleotides of the invention may be synthesized by the use of an oligonucleotide that bears a pendant reactive functionality, such as that derived from the attachment of a linking molecule onto the oligonucleotide (described below). This reactive oligonucleotide may be reacted directly with commercially-available ligands, ligands that are synthesized bearing any of a variety of protecting groups, or ligands that have a linking moiety attached thereto.

[0252] The oligonucleotides used in the conjugates of the present invention may be conveniently and routinely made through the well-known technique of solid-phase synthesis. Equipment for such synthesis is sold by several vendors including, for example, Applied Biosystems (Foster City, Calif.). Any other means for such synthesis known in the art may additionally or alternatively be employed. It is also known to use similar techniques to prepare other oligonucleotides, such as the phosphorothioates and alkylated derivatives.

[0253] In the ligand-conjugated oligonucleotides of the present invention, such as the ligand-molecule bearing sequence-specific linked nucleosides of the present invention, the oligonucleotides and oligonucleosides may be assembled on a suitable DNA synthesizer utilizing standard nucleotide or nucleoside precursors, or nucleotide or nucleoside conjugate precursors that already bear the linking moiety, ligand-nucleotide or nucleoside-conjugate precursors that already bear the ligand molecule, or non-nucleoside ligand-bearing building blocks.

[0254] When using conjugate precursors that already bear a linking moiety, the synthesis of the sequence-specific linked nucleosides is typically completed, and the ligand molecule is then reacted with the linking moiety to form the ligand-conjugated oligonucleotide. In some embodiments, the oligonucleotides or linked nucleosides of the present invention are synthesized by an automated synthesizer using phosphoramidites derived from ligand-nucleoside conjugates in addition to the standard phosphoramidites and non-standard phosphoramidites that are commercially available and routinely used in oligonucleotide synthesis.

[0255] Lipid Conjugates

[0256] In one embodiment, the ligand or conjugate is a lipid or lipid-based molecule. Such a lipid or lipid-based molecule may bind a serum protein, e.g., human serum albumin (HSA). An HSA binding ligand allows for distribution of the conjugate to a target tissue, e.g., a non-kidney target tissue of the body. A lipid or lipid-based ligand can (a) increase resistance to degradation of the conjugate, (b) increase targeting or transport into a target cell or cell membrane, and/or (c) can be used to adjust binding to a serum protein, e.g., HSA.

[0257] In another aspect, the ligand is a moiety, e.g., a vitamin, which is taken up by a target cell, e.g., a proliferating cell. Exemplary vitamins include vitamin A, E, and K.

[0258] Cell Permeation Agents

[0259] In another aspect, the ligand is a cell-permeation agent, for example a helical cell-permeation agent. In some embodiments, the cell permeation agent is amphipathic. An exemplary agent is a peptide such as tat or antennopedia. If the agent is a peptide, it can be modified, including a peptidylmimetic, invertomers, non-peptide or pseudo-peptide linkages, and use of D-amino acids. In some embodiments, the helical agent is an alpha-helical agent, which may have a lipophilic and a lipophobic phase.

[0260] The ligand can be a peptide or peptidomimetic. A peptidomimetic (also referred to herein as an oligopeptidomimetic) is a molecule capable of folding into a defined three-dimensional structure similar to a natural peptide. The attachment of peptide and peptidomimetics to oligonucleotide agents can affect pharmacokinetic distribution of the oligonucleotide, such as by enhancing cellular recognition and absorption. The peptide or peptidomimetic moiety can be about 5-50 amino acids long, e.g., about 5, 10, 15, 20, 25, 30, 35, 40, 45, or 50 amino acids long.

[0261] A peptide or peptidomimetic can be, for example, a cell permeation peptide, cationic peptide, amphipathic peptide, or hydrophobic peptide (e.g., consisting primarily of Tyr, Trp, or Phe). The peptide moiety can be a dendrimer peptide, constrained peptide or crosslinked peptide. In another alternative, the peptide moiety can include a hydrophobic membrane translocation sequence (MTS). An exemplary hydrophobic MTS-containing peptide is RFGF having the amino acid sequence AAVALLPAVLLALLAP (SEQ ID NO: 3535). An RFGF analogue (e.g., amino acid sequence AALLPVLLAAP (SEQ ID NO: 3536) containing a hydrophobic MTS can also be a targeting moiety. The peptide moiety can be a “delivery” peptide, which can carry large polar molecules including peptides, oligonucleotides, and protein across cell membranes. For example, sequences from the HIV Tat protein (GRKKRRQRRRPPQ) (SEQ ID NO: 3537) and the Drosophila Antennapedia protein (RQIKIWFQNRRMKWKK) (SEQ ID NO: 3538) have been found to be capable of functioning as delivery peptides. A peptide or peptidomimetic can be encoded by a random sequence of DNA, such as a peptide identified from a phage-display library, or one-bead-one-compound (OBOC) combinatorial library (Lam et al., Nature, 354:82-84, 1991). Examples of a peptide or peptidomimetic tethered to an oligonucleotide agent via an incorporated monomer unit for cell targeting purposes is an arginine-glycine-aspartic acid (RGD)-peptide, or RGD mimic. A peptide moiety can range in length from about 5 amino acids to about 40 amino acids. The peptide moieties can have a structural modification, such as to increase stability or direct conformational properties. Any of the structural modifications described below can be utilized.

[0262] An RGD peptide for use in the compositions and methods of the invention may be linear or cyclic, and may be modified, e.g., glycosylated or methylated, to facilitate targeting to a specific tissue(s). RGD-containing peptides and peptidiomimemtics may include D-amino acids, as well as synthetic RGD mimics. In addition to RGD, one can use other moieties that target the integrin ligand. Some conjugates of this ligand target PECAM-1 or VEGF.

[0263] A cell permeation peptide is capable of permeating a cell, e.g., a microbial cell, such as a bacterial or fungal cell, or a mammalian cell, such as a human cell. A microbial cell-permeating peptide can be, for example, an α-helical linear peptide (e.g., LL-37 or Ceropin P1), a disulfide bond-containing peptide (e.g., α-defensin, β-defensin, or bactenecin), or a peptide containing only one or two dominating amino acids (e.g., PR-39 or indolicidin). A cell permeation peptide can also include a nuclear localization signal (NLS). For example, a cell permeation peptide can be a bipartite amphipathic peptide, such as MPG, which is derived from the fusion peptide domain of HIV-1 gp41 and the NLS of SV40 large T antigen (Simeoni et al., Nucl. Acids Res. 31:2717-2724, 2003).

[0264] Carbohydrate Conjugates

[0265] In some embodiments of the compositions and methods of the invention, an oligonucleotide further comprises a carbohydrate. The carbohydrate conjugated oligonucleotides are advantageous for the in vivo delivery of nucleic acids, as well as compositions suitable for in vivo therapeutic use, as described herein. As used herein, “carbohydrate” refers to a compound which is either a carbohydrate per se made up of one or more monosaccharide units having at least 6 carbon atoms (which can be linear, branched or cyclic) with an oxygen, nitrogen or sulfur atom bonded to each carbon atom; or a compound having as a part thereof a carbohydrate moiety made up of one or more monosaccharide units each having at least six carbon atoms (which can be linear, branched or cyclic), with an oxygen, nitrogen or sulfur atom bonded to each carbon atom. Representative carbohydrates include the sugars (mono-, di-, tri- and oligosaccharides containing from about 4, 5, 6, 7, 8, or 9 monosaccharide units), and polysaccharides such as starches, glycogen, cellulose and polysaccharide gums. Specific monosaccharides include C5 and above (e.g., C5, C6, C7, or C8) sugars; di- and trisaccharides include sugars having two or three monosaccharide units (e.g., C5, C6, C7, or C8).

[0266] In one embodiment, a carbohydrate conjugate for use in the compositions and methods of the invention is a monosaccharide.

[0267] In some embodiments, the carbohydrate conjugate further comprises one or more additional ligands as described above, such as, but not limited to, a PK modulator and/or a cell permeation peptide.

[0268] Additional carbohydrate conjugates (and linkers) suitable for use in the present invention include those described in PCT Publication Nos. WO 2014/179620 and WO 2014/179627, the entire contents of each of which are incorporated herein by reference.

[0269] Linkers

[0270] In some embodiments, the conjugate or ligand described herein can be attached to an oligonucleotide with various linkers that can be cleavable or non-cleavable.

[0271] Linkers typically comprise a direct bond or an atom such as oxygen or sulfur, a unit such as NR⁸, C(O), C(O)NH, SO, SO₂, SO₂NH or a chain of atoms, such as, but not limited to, substituted or unsubstituted alkyl, substituted or unsubstituted alkenyl, substituted or unsubstituted alkynyl, arylalkyl, arylalkenyl, arylalkynyl, heteroarylalkyl, heteroarylalkenyl, heteroarylalkynyl, heterocyclylalkyl, heterocyclylalkenyl, heterocyclylalkynyl, aryl, heteroaryl, heterocyclyl, cycloalkyl, cycloalkenyl, alkylarylalkyl, alkylarylalkenyl, alkylarylalkynyl, alkenylarylalkyl, alkenylarylalkenyl, alkenylarylalkynyl, alkynylarylalkyl, alkynylarylalkenyl, alkynylarylalkynyl, alkylheteroarylalkyl, alkylheteroarylalkenyl, alkylheteroarylalkynyl, alkenylheteroarylalkyl, alkenylheteroarylalkenyl, alkenylheteroarylalkynyl, alkynylheteroarylalkyl, alkynylheteroarylalkenyl, alkynylheteroarylalkynyl, alkylheterocyclylalkyl, alkylheterocyclylalkenyl, alkylhererocyclylalkynyl, alkenylheterocyclylalkyl, alkenylheterocyclylalkenyl, alkenylheterocyclylalkynyl, alkynylheterocyclylalkyl, alkynylheterocyclylalkenyl, alkynylheterocyclylalkynyl, alkylaryl, alkenylaryl, alkynylaryl, alkylheteroaryl, alkenylheteroaryl, alkynylhereroaryl, which one or more methylenes can be interrupted or terminated by O, S, S(O), SO₂, N(R⁸), C(O), substituted or unsubstituted aryl, substituted or unsubstituted heteroaryl, substituted or unsubstituted heterocyclic; where R⁸ is hydrogen, acyl, aliphatic or substituted aliphatic. In one embodiment, the linker is between about 1-24 atoms, 2-24, 3-24, 4-24, 5-24, 6-24, 6-18, 7-18, 8-18 atoms, 7-17, 8-17, 6-16, 7-17, or 8-16 atoms.

[0272] A cleavable linking group is one which is sufficiently stable outside the cell, but which upon entry into a target cell is cleaved to release the two parts the linker is holding together. In a preferred embodiment, the cleavable linking group is cleaved at least about 10 times, 20, times, 30 times, 40 times, 50 times, 60 times, 70 times, 80 times, 90 times, or more, or at least about 100 times faster in a target cell or under a first reference condition (which can, e.g., be selected to mimic or represent intracellular conditions) than in the blood of a subject, or under a second reference condition (which can, e.g., be selected to mimic or represent conditions found in the blood or serum).

[0273] Cleavable linking groups are susceptible to cleavage agents, e.g., pH, redox potential, or the presence of degradative molecules. Generally, cleavage agents are more prevalent or found at higher levels or activities inside cells than in serum or blood. Examples of such degradative agents include: redox agents which are selective for particular substrates or which have no substrate specificity, including, e.g., oxidative or reductive enzymes or reductive agents such as mercaptans, present in cells, that can degrade a redox cleavable linking group by reduction; esterases; endosomes or agents that can create an acidic environment, e.g., those that result in a pH of five or lower; enzymes that can hydrolyze or degrade an acid cleavable linking group by acting as a general acid, peptidases (which can be substrate specific), and phosphatases.

[0274] A cleavable linkage group, such as a disulfide bond can be susceptible to pH. The pH of human serum is 7.4, while the average intracellular pH is slightly lower, ranging from about 7.1-7.3. Endosomes have a more acidic pH, in the range of 5.5-6.0, and lysosomes have an even more acidic pH at around 5.0. Some linkers will have a cleavable linking group that is cleaved at a preferred pH, thereby releasing a cationic lipid from the ligand inside the cell, or into the desired compartment of the cell.

[0275] A linker can include a cleavable linking group that is cleavable by a particular enzyme. The type of cleavable linking group incorporated into a linker can depend on the cell to be targeted. For example, a liver-targeting ligand can be linked to a cationic lipid through a linker that includes an ester group. Liver cells are rich in esterases, and therefore the linker will be cleaved more efficiently in liver cells than in cell types that are not esterase-rich. Other cell-types rich in esterases include cells of the lung, renal cortex, and testis.

[0276] Linkers that contain peptide bonds can be used when targeting cell types rich in peptidases, such as liver cells and synoviocytes.

[0277] In general, the suitability of a candidate cleavable linking group can be evaluated by testing the ability of a degradative agent (or condition) to cleave the candidate linking group. It will also be desirable to also test the candidate cleavable linking group for the ability to resist cleavage in the blood or when in contact with other non-target tissue. Thus, one can determine the relative susceptibility to cleavage between a first and a second condition, where the first is selected to be indicative of cleavage in a target cell and the second is selected to be indicative of cleavage in other tissues or biological fluids, e.g., blood or serum. The evaluations can be carried out in cell free systems, in cells, in cell culture, in organ or tissue culture, or in whole animals. It can be useful to make initial evaluations in cell-free or culture conditions and to confirm by further evaluations in whole animals. In preferred embodiments, useful candidate compounds are cleaved at least about 2, 4, 10, 20, 30, 40, 50, 60, 70, 80, 90, or about 100 times faster in the cell (or under in vitro conditions selected to mimic intracellular conditions) as compared to blood or serum (or under in vitro conditions selected to mimic extracellular conditions).

[0278] Redox Cleavable Linking Groups

[0279] In one embodiment, a cleavable linking group is a redox cleavable linking group that is cleaved upon reduction or oxidation. An example of reductively cleavable linking group is a disulphide linking group (—S—S—). To determine if a candidate cleavable linking group is a suitable “reductively cleavable linking group,” or for example is suitable for use with a particular oligonucleotide moiety and particular targeting agent one can look to methods described herein. For example, a candidate can be evaluated by incubation with dithiothreitol (DTT), or other reducing agent using reagents know in the art, which mimic the rate of cleavage which would be observed in a cell, e.g., a target cell. The candidates can also be evaluated under conditions which are selected to mimic blood or serum conditions. In one embodiment, candidate compounds are cleaved by at most about 10% in the blood. In other embodiments, useful candidate compounds are degraded at least about 2, 4, 10, 20, 30, 40, 50, 60, 70, 80, 90, or about 100 times faster in the cell (or under in vitro conditions selected to mimic intracellular conditions) as compared to blood (or under in vitro conditions selected to mimic extracellular conditions). The rate of cleavage of candidate compounds can be determined using standard enzyme kinetics assays under conditions chosen to mimic intracellular media and compared to conditions chosen to mimic extracellular media.

[0280] Phosphate-Based Cleavable Linking Groups

[0281] In another embodiment, a cleavable linker comprises a phosphate-based cleavable linking group. A phosphate-based cleavable linking group is cleaved by agents that degrade or hydrolyze the phosphate group. An example of an agent that cleaves phosphate groups in cells are enzymes such as phosphatases in cells. Examples of phosphate-based linking groups are —O—P(O)(OR^{k})—O—,

[0282] —O—P(S)(OR^{k})—O—, —O—P(S)(SR^{k})—O—, —S—P(O)(OR^{k})—O—, —O—P(O)(OR^{k})—S—, —S—P(O)(OR^{k})—S—,

[0283] —O—P(S)(OR^{k})—S—, —S—P(S)(OR^{k})—O—, —O—P(O)(R^{k})—O—, —O—P(S)(R^{k})—O—, —S—P(O)(R^{k})—O—, —S—P(S)(R^{k})—O—,

[0284] —S—P(O)(R^{k})—S—, —O—P(S)(R^{k})—S—. These candidates can be evaluated using methods analogous to those described above.

[0285] Acid Cleavable Linking Groups

[0286] In another embodiment, a cleavable linker comprises an acid cleavable linking group. An acid cleavable linking group is a linking group that is cleaved under acidic conditions. In preferred embodiments acid cleavable linking groups are cleaved in an acidic environment with a pH of about 6.5 or lower (e.g., about 6.0, 5.75, 5.5, 5.25, 5.0, or lower), or by agents such as enzymes that can act as a general acid. In a cell, specific low pH organelles, such as endosomes and lysosomes can provide a cleaving environment for acid cleavable linking groups. Examples of acid cleavable linking groups include but are not limited to hydrazones, esters, and esters of amino acids. Acid cleavable groups can have the general formula —C═NN—, C(O)O, or —OC(O). A preferred embodiment is when the carbon attached to the oxygen of the ester (the alkoxy group) is an aryl group, substituted alkyl group, or tertiary alkyl group such as dimethyl pentyl or t-butyl. These candidates can be evaluated using methods analogous to those described above.

[0287] Ester-Based Linking Groups

[0288] In another embodiment, a cleavable linker comprises an ester-based cleavable linking group. An ester-based cleavable linking group is cleaved by enzymes such as esterases and amidases in cells. Examples of ester-based cleavable linking groups include but are not limited to esters of alkylene, alkenylene and alkynylene groups. Ester cleavable linking groups have the general formula —C(O)O—, or —OC(O)—. These candidates can be evaluated using methods analogous to those described above.

[0289] Peptide-Based Cleaving Groups

[0290] In yet another embodiment, a cleavable linker comprises a peptide-based cleavable linking group. A peptide-based cleavable linking group is cleaved by enzymes such as peptidases and proteases in cells. Peptide-based cleavable linking groups are peptide bonds formed between amino acids to yield oligopeptides (e.g., dipeptides, tripeptides etc.) and polypeptides. Peptide-based cleavable groups do not include the amide group (—C(O)NH—). The amide group can be formed between any alkylene, alkenylene, or alkynelene. A peptide bond is a special type of amide bond formed between amino acids to yield peptides and proteins. The peptide based cleavage group is generally limited to the peptide bond (i.e., the amide bond) formed between amino acids yielding peptides and proteins and does not include the entire amide functional group. Peptide-based cleavable linking groups have the general formula

[0291] —NHCHR^{A}C(O)NHCHR^{B}C(O)—, where R^{A} and R^{B} are the R groups of the two adjacent amino acids. These candidates can be evaluated using methods analogous to those described above.

[0292] In one embodiment, an oligonucleotide of the invention is conjugated to a carbohydrate through a linker. Linkers include bivalent and trivalent branched linker groups. Linkers for oligonucleotide carbohydrate conjugates include, but are not limited to, those described in formulas 24-35 of PCT Publication No. WO 2018/195165.

[0293] Representative U.S. patents that teach the preparation of oligonucleotide conjugates include, but are not limited to, U.S. Pat. Nos. 4,828,979; 4,948,882; 5,218,105; 5,525,465; 5,541,313; 5,545,730; 5,552,538; 5,578,717, 5,580,731; 5,591,584; 5,109,124; 5,118,802; 5,138,045; 5,414,077; 5,486,603; 5,512,439; 5,578,718; 5,608,046; 4,587,044; 4,605,735; 4,667,025; 4,762,779; 4,789,737; 4,824,941; 4,835,263; 4,876,335; 4,904,582; 4,958,013; 5,082,830; 5,112,963; 5,214,136; 5,082,830; 5,112,963; 5,214,136; 5,245,022; 5,254,469; 5,258,506; 5,262,536; 5,272,250; 5,292,873; 5,317,098; 5,371,241, 5,391,723; 5,416,203, 5,451,463; 5,510,475; 5,512,667; 5,514,785; 5,565,552; 5,567,810; 5,574,142; 5,585,481; 5,587,371; 5,595,726; 5,597,696; 5,599,923; 5,599,928 and 5,688,941; 6,294,664; 6,320,017; 6,576,752; 6,783,931; 6,900,297; 7,037,646; 8,106,022, the entire contents of each of which are hereby incorporated herein by reference.

[0294] It is not necessary for all positions in a given compound to be uniformly modified, and in fact more than one of the aforementioned modifications can be incorporated in a single compound or even at a single nucleoside within an oligonucleotide. The present invention also includes oligonucleotide compounds that are chimeric compounds. Chimeric oligonucleotides typically contain at least one region wherein the RNA is modified so as to confer upon the oligonucleotide increased resistance to nuclease degradation, increased cellular uptake, and/or increased binding affinity for the target nucleic acid. An additional region of the oligonucleotide can serve as a substrate for enzymes capable of cleaving RNA:DNA. By way of example, RNase H is a cellular endonuclease which cleaves the RNA strand of an RNA:DNA duplex. Activation of RNase H, therefore, results in cleavage of the RNA target, thereby greatly enhancing the efficiency of oligonucleotide inhibition of gene expression. Consequently, comparable results can often be obtained with shorter oligonucleotides when chimeric oligonucleotides are used, compared to phosphorothioate deoxy oligonucleotides hybridizing to the same target region. Cleavage of the RNA target can be routinely detected by gel electrophoresis and, if necessary, associated nucleic acid hybridization techniques known in the art.

[0295] In certain instances, the nucleotides of an oligonucleotide can be modified by a non-ligand group. A number of non-ligand molecules have been conjugated to oligonucleotides in order to enhance the activity, cellular distribution, or cellular uptake of the oligonucleotide, and procedures for performing such conjugations are available in the scientific literature. Such non-ligand moieties have included lipid moieties, such as cholesterol (Kubo, T. et al., Biochem. Biophys. Res. Comm, 2007, 365(1):54-61; Letsinger et al., Proc. Natl. Acad. Sci. USA, 1989, 86:6553), cholic acid (Manoharan et al., Bioorg. Med. Chem. Lett., 1994, 4:1053), a thioether, e.g., hexyl-S-tritylthiol (Manoharan et al., Ann. N.Y. Acad. Sci., 1992, 660:306; Manoharan et al., Bioorg. Med. Chem. Let., 1993, 3:2765), a thiocholesterol (Oberhauser et al., Nucl. Acids Res., 1992, 20:533), an aliphatic chain, e.g., dodecandiol or undecyl residues (Saison-Behmoaras et al., EMBO J., 1991, 10:111; Kabanov et al., FEBS Lett., 1990, 259:327; Svinarchuk et al., Biochimie, 1993, 75:49), a phospholipid, e.g., di-hexadecyl-rac-glycerol or triethylammonium 1,2-di-O-hexadecyl-rac-glycero-3-H-phosphonate (Manoharan et al., Tetrahedron Lett., 1995, 36:3651; Shea et al., Nucl. Acids Res., 1990, 18:3777), a polyamine or a polyethylene glycol chain (Manoharan et al., Nucleosides & Nucleotides, 1995, 14:969), or adamantane acetic acid (Manoharan et al., Tetrahedron Lett., 1995, 36:3651), a palmityl moiety (Mishra et al., Biochim. Biophys. Acta, 1995, 1264:229), or an octadecylamine or hexylamino-carbonyl-oxycholesterol moiety (Crooke et al., J. Pharmacol. Exp. Ther., 1996, 277:923). Representative United States patents that teach the preparation of such oligonucleotide conjugates have been listed above. Typical conjugation protocols involve the synthesis of an oligonucleotide bearing an aminolinker at one or more positions of the sequence. The amino group is then reacted with the molecule being conjugated using appropriate coupling or activating reagents. The conjugation reaction can be performed either with the oligonucleotide still bound to the solid support or following cleavage of the oligonucleotide, in solution phase. Purification of the oligonucleotide conjugate by HPLC typically affords the pure conjugate.

[0296] Pharmaceutical Uses

[0297] The oligonucleotide compositions described herein are useful in the methods of the invention and, while not bound by theory, are believed to exert their desirable effects through their ability to modulate the level, status, and/or activity of KCNT1, e.g., by inhibiting the activity or level of the KCNT1 protein in a cell in a mammal.

[0298] An aspect of the present invention relates to methods of treating disorders (e.g., epilepsy) related to KCNT1 in a subject in need thereof. Another aspect of the invention includes reducing the level of KCNT1 in a cell of a subject identified as having a KCNT1 related disorder. Still another aspect includes a method of inhibiting expression of KCNT1 in a cell in a subject. The methods may include contacting a cell with an oligonucleotide, in an amount effective to inhibit expression of KCNT1 in the cell, thereby inhibiting expression of KCNT1 in the cell.

[0299] Based on the above methods, further aspects of the present invention include an oligonucleotide of the invention, or a composition comprising such an oligonucleotide, for use in therapy, or for use as a medicament, or for use in treating KCNT1 related disorders in a subject in need thereof, or for use in reducing the level of KCNT1 in a cell of a subject identified as having a KCNT1 related disorder, or for use in inhibiting expression of KCNT1 in a cell in a subject. The uses include the contacting of a cell with the oligonucleotide, in an amount effective to inhibit expression of KCNT1 in the cell, thereby inhibiting expression of KCNT1 in the cell. Embodiments described below in relation to the methods of the invention are also applicable to these further aspects.

[0300] Contacting of a cell with an oligonucleotide may be done in vitro or in vivo. Contacting a cell in vivo with the oligonucleotide includes contacting a cell or group of cells within a subject, e.g., a human subject, with the oligonucleotide. Combinations of in vitro and in vivo methods of contacting a cell are also possible. Contacting a cell may be direct or indirect, as discussed above. Furthermore, contacting a cell may be accomplished via a targeting ligand, including any ligand described herein or known in the art. In some embodiments, the targeting ligand is a carbohydrate moiety, e.g., a GalNAc₃ ligand, or any other ligand that directs the oligonucleotide to a site of interest. Cells can include those of the central nervous system, or muscle cells.

[0301] Inhibiting expression of a KCNT1 gene includes any level of inhibition of a KCNT1 gene, e.g., at least partial suppression of the expression of a KCNT1 gene, such as an inhibition by at least about 20%. In certain embodiments, inhibition is by at least about 25%, at least about 30%, at least about 35%, at least about 40%, at least about 45%, at least about 50%, at least about 55%, at least about 60%, at least about 65%, at least about 70%, at least about 75%, at least about 80%, at least about 85%, at least about 90%, at least about 91%, at least about 92%, at least about 93%, at least about 94%, at least about 95%, at least about 96%, at least about 97%, at least about 98%, or at least about 99%.

[0302] The expression of a KCNT1 gene may be assessed based on the level of any variable associated with KCNT1 gene expression, e.g., KCNT1 mRNA level or KCNT1 protein level.

[0303] Inhibition may be assessed by a decrease in an absolute or relative level of one or more of these variables compared with a control level. The control level may be any type of control level that is utilized in the art, e.g., a pre-dose baseline level, or a level determined from a similar subject, cell, or sample that is untreated or treated with a control (such as, e.g., buffer only control or inactive agent control).

[0304] In certain embodiments, surrogate markers can be used to detect inhibition of KCNT1. For example, effective treatment of a KCNT1 related disorder, as demonstrated by acceptable diagnostic and monitoring criteria with an agent to reduce KCNT1 expression can be understood to demonstrate a clinically relevant reduction in KCNT1.

[0305] In some embodiments of the methods of the invention, expression of a KCNT1 gene is inhibited by at least 20%, a 25%, 30%, 35%, 40%, 45%, 50%, 55%, 60%, 65%, 70%, 75%, 80%, 85%, 90%, or 95%, or to below the level of detection of the assay. In certain embodiments, the methods include a clinically relevant inhibition of expression of KCNT1, e.g. as demonstrated by a clinically relevant outcome after treatment of a subject with an agent to reduce the expression of KCNT1.

[0306] Inhibition of the expression of a KCNT1 gene may be manifested by a reduction of the amount of mRNA expressed by a first cell or group of cells (such cells may be present, for example, in a sample derived from a subject) in which a KCNT1 gene is transcribed and which has or have been treated (e.g., by contacting the cell or cells with an oligonucleotide of the invention, or by administering an oligonucleotide of the invention to a subject in which the cells are or were present) such that the expression of a KCNT1 gene is inhibited, as compared to a second cell or group of cells substantially identical to the first cell or group of cells but which has not or have not been so treated (control cell(s) not treated with an oligonucleotide or not treated with an oligonucleotide targeted to the gene of interest). The degree of inhibition may be expressed in terms of:

$$\frac{( mRNA in control cells ) - ( mRNA in treated cells )}{( mRNA in control cells )} \times 100 \%$$

[0307] In other embodiments, inhibition of the expression of a KCNT1 gene may be assessed in terms of a reduction of a parameter that is functionally linked to KCNT1 gene expression, e.g., KCNT1 protein expression or KCNT1 activity. KCNT1 gene silencing may be determined in any cell expressing KCNT1, either endogenous or heterologous from an expression construct, and by any assay known in the art.

[0308] Inhibition of the expression of a KCNT1 protein may be manifested by a reduction in the level of the KCNT1 protein that is expressed by a cell or group of cells (e.g., the level of protein expressed in a sample derived from a subject). As explained above, for the assessment of mRNA suppression, the inhibition of protein expression levels in a treated cell or group of cells may similarly be expressed as a percentage of the level of protein in a control cell or group of cells.

[0309] A control cell or group of cells that may be used to assess the inhibition of the expression of a KCNT1 gene includes a cell or group of cells that has not yet been contacted with an oligonucleotide of the invention. For example, the control cell or group of cells may be derived from an individual subject (e.g., a human or animal subject) prior to treatment of the subject with an oligonucleotide.

[0310] The level of KCNT1 mRNA that is expressed by a cell or group of cells may be determined using any method known in the art for assessing mRNA expression. In one embodiment, the level of expression of KCNT1 in a sample is determined by detecting a transcribed polynucleotide, or portion thereof, e.g., mRNA of the KCNT1 gene. RNA may be extracted from cells using RNA extraction techniques including, for example, using acid phenol/guanidine isothiocyanate extraction (RNAzol B; Biogenesis), RNEASY™ RNA preparation kits (Qiagen) or PAXgene (PreAnalytix, Switzerland). Typical assay formats utilizing ribonucleic acid hybridization include nuclear run-on assays, RT-PCR, RNase protection assays, northern blotting, in situ hybridization, and microarray analysis. Circulating KCNT1 mRNA may be detected using methods the described in PCT Publication WO 2012/177906, the entire contents of which are hereby incorporated herein by reference. In some embodiments, the level of expression of KCNT1 is determined using a nucleic acid probe. The term “probe,” as used herein, refers to any molecule that is capable of selectively binding to a specific KCNT1 sequence, e.g. to an mRNA or polypeptide. Probes can be synthesized by one of skill in the art, or derived from appropriate biological preparations. Probes may be specifically designed to be labeled. Examples of molecules that can be utilized as probes include, but are not limited to, RNA, DNA, proteins, antibodies, and organic molecules.

[0311] Isolated mRNA can be used in hybridization or amplification assays that include, but are not limited to, Southern or northern analyses, polymerase chain reaction (PCR) analyses, and probe arrays. One method for the determination of mRNA levels involves contacting the isolated mRNA with a nucleic acid molecule (probe) that can hybridize to KCNT1 mRNA. In one embodiment, the mRNA is immobilized on a solid surface and contacted with a probe, for example by running the isolated mRNA on an agarose gel and transferring the mRNA from the gel to a membrane, such as nitrocellulose. In an alternative embodiment, the probe(s) are immobilized on a solid surface and the mRNA is contacted with the probe(s), for example, in an AFFYMETRIX gene chip array. A skilled artisan can readily adapt known mRNA detection methods for use in determining the level of KCNT1 mRNA.

[0312] An alternative method for determining the level of expression of KCNT1 in a sample involves the process of nucleic acid amplification and/or reverse transcriptase (to prepare cDNA) of for example mRNA in the sample, e.g., by RT-PCR (the experimental embodiment set forth in Mullis, 1987, U.S. Pat. No. 4,683,202), ligase chain reaction (Barany (1991) Proc. Natl. Acad. Sci. USA 88:189-193), self-sustained sequence replication (Guatelli et al. (1990) Proc. Natl. Acad. Sci. USA 87:1874-1878), transcriptional amplification system (Kwoh et al. (1989) Proc. Natl. Acad. Sci. USA 86:1173-1177), Q-Beta Replicase (Lizardi et al. (1988) Bio/Technology 6:1197), rolling circle replication (Lizardi et al., U.S. Pat. No. 5,854,033) or any other nucleic acid amplification method, followed by the detection of the amplified molecules using techniques well known to those of skill in the art. These detection schemes are especially useful for the detection of nucleic acid molecules if such molecules are present in very low numbers. In particular aspects of the invention, the level of expression of KCNT1 is determined by quantitative fluorogenic RT-PCR (i.e., the TAQMAN™ System) or the DUAL-GLO® Luciferase assay.

[0313] The expression levels of KCNT1 mRNA may be monitored using a membrane blot (such as used in hybridization analysis such as northern, Southern, dot, and the like), or microwells, sample tubes, gels, beads or fibers (or any solid support comprising bound nucleic acids). See U.S. Pat. Nos. 5,770,722; 5,874,219; 5,744,305; 5,677,195; and 5,445,934, which are incorporated herein by reference. The determination of KCNT1 expression level may also comprise using nucleic acid probes in solution.

[0314] In some embodiments, the level of mRNA expression is assessed using branched DNA (bDNA) assays or real time PCR (qPCR). The use of this PCR method is described and exemplified in the Examples presented herein. Such methods can also be used for the detection of KCNT1 nucleic acids.

[0315] The level of KCNT1 protein expression may be determined using any method known in the art for the measurement of protein levels. Such methods include, for example, electrophoresis, capillary electrophoresis, high performance liquid chromatography (HPLC), thin layer chromatography (TLC), hyperdiffusion chromatography, fluid or gel precipitin reactions, absorption spectroscopy, a colorimetric assays, spectrophotometric assays, flow cytometry, immunodiffusion (single or double), immunoelectrophoresis, western blotting, radioimmunoassay (RIA), enzyme-linked immunosorbent assays (ELISAs), immunofluorescent assays, electrochemiluminescence assays, and the like. Such assays can also be used for the detection of proteins indicative of the presence or replication of KCNT1 proteins.

[0316] In some embodiments of the methods of the invention, the oligonucleotide is administered to a subject such that the oligonucleotide is delivered to a specific site within the subject. The inhibition of expression of KCNT1 may be assessed using measurements of the level or change in the level of KCNT1 mRNA or KCNT1 protein in a sample derived from a specific site within the subject. In certain embodiments, the methods include a clinically relevant inhibition of expression of KCNT1, e.g., as demonstrated by a clinically relevant outcome after treatment of a subject with an agent to reduce the expression of KCNT1.

[0317] In other embodiments, the oligonucleotide is administered in an amount and for a time effective to result in reduction (e.g., by 10%, 20%, 30%, 40%, 50%, 60%, 70%, 80%, 90%, or 100%) of one or more symptoms of a KCNT1 disorder. Such symptoms include, but are not limited to, prolonged seizures, frequent seizures, behavioral and developmental delays, movement and balance issues, orthopedic conditions, delayed language and speech issues, growth and nutrition issues, sleeping difficulties, chronic infection, sensory integration disorder, disruption of the autonomic nervous system, and sweating.

[0318] Treating KCNT1 related disorders can result in an increase in average survival time of an individual or a population of subjects treated according to the present invention in comparison to a population of untreated subjects. For example, the survival time is of an individual or average survival time a of population is increased by more than 30 days (more than 60 days, 90 days, or 120 days). An increase in survival time of an individual or in average survival time of a population may be measured by any reproducible means. An increase in survival time of an individual may be measured, for example, by calculating for an individual the length of survival time following the initiation of treatment with the compound described herein. An increase in average survival time of a population may be measured, for example, by calculating for the average length of survival time following initiation of treatment with the compound described herein. An increase in survival time of an individual may also be measured, for example, by calculating for an individual length of survival time following completion of a first round of treatment with a compound or pharmaceutically acceptable salt of a compound described herein. An increase in average survival time of a population may also be measured, for example, by calculating for a population the average length of survival time following completion of a first round of treatment with a compound or pharmaceutically acceptable salt of a compound described herein.

[0319] Treating KCNT1 related disorders can also result in a decrease in the mortality rate of a population of treated subjects in comparison to an untreated population. For example, the mortality rate is decreased by more than 2% (e.g., more than 5%, 10%, or 25%). A decrease in the mortality rate of a population of treated subjects may be measured by any reproducible means, for example, by calculating for a population the average number of disease-related deaths per unit time following initiation of treatment with a compound or pharmaceutically acceptable salt of a compound described herein. A decrease in the mortality rate of a population may also be measured, for example, by calculating for a population the average number of disease-related deaths per unit time following completion of a first round of treatment with a compound or pharmaceutically acceptable salt of a compound described herein.

[0320] Delivery of Oligonucleotides

[0321] The delivery of an oligonucleotide of the invention to a cell e.g., a cell within a subject, such as a human subject e.g., a subject in need thereof, such as a subject having a KCNT1 related disorder can be achieved in a number of different ways. For example, delivery may be performed by contacting a cell with an oligonucleotide of the invention either in vitro or in vivo. In vivo delivery may also be performed directly by administering a composition comprising an oligonucleotide to a subject. These alternatives are discussed further below.

[0322] In general, any method of delivering a nucleic acid molecule (in vitro or in vivo) can be adapted for use with an oligonucleotide of the invention (see e.g., Akhtar S. and Julian R L., (1992) Trends Cell. Biol. 2(5):139-144 and WO 94/02595, which are incorporated herein by reference in their entireties). For in vivo delivery, factors to consider in order to deliver an oligonucleotide molecule include, for example, biological stability of the delivered molecule, prevention of non-specific effects, and accumulation of the delivered molecule in the target tissue. The non-specific effects of an oligonucleotide can be minimized by local administration, for example, by direct injection or implantation into a tissue or topically administering the preparation. Local administration to a treatment site maximizes local concentration of the agent, limits the exposure of the agent to systemic tissues that can otherwise be harmed by the agent or that can degrade the agent, and permits a lower total dose of the oligonucleotide molecule to be administered.

[0323] For administering an oligonucleotide systemically for the treatment of a disease, the oligonucleotide can include alternative nucleobases, alternative sugar moieties, and/or alternative internucleoside linkages, or alternatively delivered using a drug delivery system; both methods act to prevent the rapid degradation of the oligonucleotide by endo- and exo-nucleases in vivo. Modification of the oligonucleotide or the pharmaceutical carrier can also permit targeting of the oligonucleotide composition to the target tissue and avoid undesirable off-target effects. Oligonucleotide molecules can be modified by chemical conjugation to lipophilic groups such as cholesterol to enhance cellular uptake and prevent degradation. In an alternative embodiment, the oligonucleotide can be delivered using drug delivery systems such as a nanoparticle, a lipid nanoparticle, a polyplex nanoparticle, a lipoplex nanoparticle, a dendrimer, a polymer, liposomes, or a cationic delivery system. Positively charged cationic delivery systems facilitate binding of an oligonucleotide molecule (negatively charged) and also enhance interactions at the negatively charged cell membrane to permit efficient uptake of an oligonucleotide by the cell. Cationic lipids, dendrimers, or polymers can either be bound to an oligonucleotide, or induced to form a vesicle or micelle that encases an oligonucleotide. The formation of vesicles or micelles further prevents degradation of the oligonucleotide when administered systemically. In general, any methods of delivery of nucleic acids known in the art may be adaptable to the delivery of the oligonucleotides of the invention. Methods for making and administering cationic oligonucleotide complexes are well within the abilities of one skilled in the art (see e.g., Sorensen, D R., et al. (2003) J. Mol. Biol 327:761-766; Verma, U N. et al., (2003) Clin. Cancer Res. 9:1291-1300; Arnold, A S et al., (2007) J. Hypertens. 25:197-205, which are incorporated herein by reference in their entirety). Some non-limiting examples of drug delivery systems useful for systemic delivery of oligonucleotides include DOTAP (Sorensen, D R., et al (2003), supra; Verma, U N. et al., (2003), supra), Oligofectamine, “solid nucleic acid lipid particles” (Zimmermann, T S. et al., (2006) Nature 441:111-114), cardiolipin (Chien, P Y. et al., (2005) Cancer Gene Ther. 12:321-328; Pal, A. et al., (2005) Int J. Oncol. 26:1087-1091), polyethyleneimine (Bonnet M E. et al., (2008) Pharm. Res. August 16 Epub ahead of print; Aigner, A. (2006) J. Biomed. Biotechnol. 71659), Arg-Gly-Asp (RGD) peptides (Liu, S. (2006) Mol. Pharm. 3:472-487), and polyamidoamines (Tomalia, D A. et al., (2007) Biochem. Soc. Trans. 35:61-67; Yoo, H. et al., (1999) Pharm. Res. 16:1799-1804). In some embodiments, an oligonucleotide forms a complex with cyclodextrin for systemic administration. Methods for administration and pharmaceutical compositions of oligonucleotides and cyclodextrins can be found in U.S. Pat. No. 7,427,605, which is herein incorporated by reference in its entirety. In some embodiments the oligonucleotides of the invention are delivered by polyplex or lipoplex nanoparticles. Methods for administration and pharmaceutical compositions of oligonucleotides and polyplex nanoparticles and lipoplex nanoparticles can be found in U.S. Patent

[0324] Application Nos. 2017/0121454; 2016/0369269; 2016/0279256; 2016/0251478; 2016/0230189; 2015/0335764; 2015/0307554; 2015/0174549; 2014/0342003; 2014/0135376; and 2013/0317086, which are herein incorporated by reference in their entirety.

[0325] In some embodiments, the compounds described herein may be administered in combination with additional therapeutics. Examples of additional therapeutics include standard of care anti-epilepsy medications such as quinidine and/or sodium channel blockers. Additionally, the compounds described herein may be administered in combination with recommended lifestyle changes such as a ketogenic diet.

[0326] Membranous Molecular Assembly Delivery Methods

[0327] Oligonucleotides of the invention can also be delivered using a variety of membranous molecular assembly delivery methods including polymeric, biodegradable microparticle, or microcapsule delivery devices known in the art. For example, a colloidal dispersion system may be used for targeted delivery of an oligonucleotide agent described herein. Colloidal dispersion systems include macromolecule complexes, nanocapsules, microspheres, beads, and lipid-based systems including oil-in-water emulsions, micelles, mixed micelles, and liposomes. Liposomes are artificial membrane vesicles that are useful as delivery vehicles in vitro and in vivo. It has been shown that large unilamellar vesicles (LUV), which range in size from 0.2-4.0 μm can encapsulate a substantial percentage of an aqueous buffer containing large macromolecules. Liposomes are useful for the transfer and delivery of active ingredients to the site of action. Because the liposomal membrane is structurally similar to biological membranes, when liposomes are applied to a tissue, the liposomal bilayer fuses with bilayer of the cellular membranes. As the merging of the liposome and cell progresses, the internal aqueous contents that include the oligonucleotide are delivered into the cell where the oligonucleotide can specifically bind to a target RNA and can mediate RNase H-mediated gene silencing. In some cases, the liposomes are also specifically targeted, e.g., to direct the oligonucleotide to particular cell types. The composition of the liposome is usually a combination of phospholipids, usually in combination with steroids, especially cholesterol. Other phospholipids or other lipids may also be used. The physical characteristics of liposomes depend on pH, ionic strength, and the presence of divalent cations.

[0328] A liposome containing an oligonucleotide can be prepared by a variety of methods. In one example, the lipid component of a liposome is dissolved in a detergent so that micelles are formed with the lipid component. For example, the lipid component can be an amphipathic cationic lipid or lipid conjugate. The detergent can have a high critical micelle concentration and may be nonionic. Exemplary detergents include cholate, CHAPS, octylglucoside, deoxycholate, and lauroyl sarcosine. The oligonucleotide preparation is then added to the micelles that include the lipid component. The cationic groups on the lipid interact with the oligonucleotide and condense around the oligonucleotide to form a liposome. After condensation, the detergent is removed, e.g., by dialysis, to yield a liposomal preparation of oligonucleotide.

[0329] If necessary, a carrier compound that assists in condensation can be added during the condensation reaction, e.g., by controlled addition. For example, the carrier compound can be a polymer other than a nucleic acid (e.g., spermine or spermidine). The pH can also be adjusted to favor condensation.

[0330] Methods for producing stable polynucleotide delivery vehicles, which incorporate a polynucleotide/cationic lipid complex as a structural component of the delivery vehicle, are further described in, e.g., WO 96/37194, the entire contents of which are incorporated herein by reference. Liposome formation can also include one or more aspects of exemplary methods described in Feigner, P. L. et al., (1987) Proc. Natl. Acad. Sci. USA 8:7413-7417; U.S. Pat. Nos. 4,897,355; 5,171,678; Bangham et al., (1965) M. Mol. Biol. 23:238; Olson et al., (1979) Biochim. Biophys. Acta 557:9; Szoka et al., (1978) Proc. Natl. Acad. Sci. 75: 4194; Mayhew et al., (1984) Biochim. Biophys. Acta 775:169; Kim et al., (1983) Biochim. Biophys. Acta 728:339; and Fukunaga et al., (1984) Endocrinol. 115:757. Commonly used techniques for preparing lipid aggregates of appropriate size for use as delivery vehicles include sonication and freeze-thaw plus extrusion (see, e.g., Mayer et al., (1986) Biochim. Biophys. Acta 858:161. Microfluidization can be used when consistently small (50 to 200 nm) and relatively uniform aggregates are desired (Mayhew et al., (1984) Biochim. Biophys. Acta 775:169). These methods are readily adapted to packaging oligonucleotide preparations into liposomes.

[0331] Liposomes fall into two broad classes. Cationic liposomes are positively charged liposomes which interact with the negatively charged nucleic acid molecules to form a stable complex. The positively charged nucleic acid/liposome complex binds to the negatively charged cell surface and is internalized in an endosome. Due to the acidic pH within the endosome, the liposomes are ruptured, releasing their contents into the cell cytoplasm (Wang et al. (1987) Biochem. Biophys. Res. Commun., 147:980-985).

[0332] Liposomes, which are pH-sensitive or negatively charged, entrap nucleic acids rather than complex with them. Since both the nucleic acid and the lipid are similarly charged, repulsion rather than complex formation occurs. Nevertheless, some nucleic acid is entrapped within the aqueous interior of these liposomes. pH sensitive liposomes have been used to deliver nucleic acids encoding the thymidine kinase gene to cell monolayers in culture. Expression of the exogenous gene was detected in the target cells (Zhou et al. (1992) Journal of Controlled Release, 19:269-274).

[0333] One major type of liposomal composition includes phospholipids other than naturally derived phosphatidylcholine. Neutral liposome compositions, for example, can be formed from dimyristoyl phosphatidylcholine (DMPC) or dipalmitoyl phosphatidylcholine (DPPC). Anionic liposome compositions generally are formed from dimyristoyl phosphatidylglycerol, while anionic fusogenic liposomes are formed primarily from dioleoyl phosphatidylethanolamine (DOPE). Another type of liposomal composition is formed from phosphatidylcholine (PC) such as, for example, soybean PC, and egg PC. Another type is formed from mixtures of phospholipid and/or phosphatidylcholine and/or cholesterol.

[0334] Examples of other methods to introduce liposomes into cells in vitro and in vivo include U.S. Pat. Nos. 5,283,185; 5,171,678; WO 94/00569; WO 93/24640; WO 91/16024; Feigner, (1994) J. Biol. Chem. 269:2550; Nabel, (1993) Proc. Natl. Acad. Sci. 90:11307; Nabel, (1992) Human Gene Ther. 3:649; Gershon, (1993) Biochem. 32:7143; and Strauss, (1992) EMBO J. 11:417.

[0335] Non-ionic liposomal systems have also been examined to determine their utility in the delivery of drugs to the skin, in particular systems comprising non-ionic surfactant and cholesterol. Non-ionic liposomal formulations comprising NOVASOME™ I (glyceryl dilaurate/cholesterol/polyoxyethylene-10-stearyl ether) and NOVASOME™ II (glyceryl distearate/cholesterol/polyoxyethylene-10-stearyl ether) were used to deliver cyclosporin-A into the dermis of mouse skin. Results indicated that such non-ionic liposomal systems were effective in facilitating the deposition of cyclosporine A into different layers of the skin (Hu et al., (1994) S.T.P.Pharma. Sci., 4(6):466).

[0336] Liposomes may also be sterically stabilized liposomes, comprising one or more specialized lipids that result in enhanced circulation lifetimes relative to liposomes lacking such specialized lipids. Examples of sterically stabilized liposomes are those in which part of the vesicle-forming lipid portion of the liposome (A) comprises one or more glycolipids, such as monosialoganglioside G_{M1}, or (B) is derivatized with one or more hydrophilic polymers, such as a polyethylene glycol (PEG) moiety. While not wishing to be bound by any particular theory, it is thought in the art that, at least for sterically stabilized liposomes containing gangliosides, sphingomyelin, or PEG-derivatized lipids, the enhanced circulation half-life of these sterically stabilized liposomes derives from a reduced uptake into cells of the reticuloendothelial system (RES) (Allen et al., (1987) FEBS Letters, 223:42; Wu et al., (1993) Cancer Research, 53:3765).

[0337] Various liposomes comprising one or more glycolipids are known in the art. Papahadjopoulos et al. (Ann. N.Y. Acad. Sci., (1987), 507:64) reported the ability of monosialoganglio side G^{M1}, galactocerebroside sulfate, and phosphatidylinositol to improve blood half-lives of liposomes. These findings were expounded upon by Gabizon et al. (Proc. Natl. Acad. Sci. U.S.A., (1988), 85:6949). U.S. Pat. No. 4,837,028 and WO 88/04924, both to Allen et al., disclose liposomes comprising (1) sphingomyelin and (2) the ganglioside G_{M}1 or a galactocerebroside sulfate ester. U.S. Pat. No. 5,543,152 (Webb et al.) discloses liposomes comprising sphingomyelin. Liposomes comprising 1,2-sn-dimyristoylphosphatidylcholine are disclosed in WO 97/13499 (Lim et al).

[0338] In one embodiment, cationic liposomes are used. Cationic liposomes possess the advantage of being able to fuse to the cell membrane. Non-cationic liposomes, although not able to fuse as efficiently with the plasma membrane, are taken up by macrophages in vivo and can be used to deliver oligonucleotides to macrophages.

[0339] Further advantages of liposomes include: liposomes obtained from natural phospholipids are biocompatible and biodegradable; liposomes can incorporate a wide range of water and lipid soluble drugs; liposomes can protect encapsulated oligonucleotides in their internal compartments from metabolism and degradation (Rosoff, in “Pharmaceutical Dosage Forms,” Lieberman, Rieger and Banker (Eds.), 1988, volume 1, p. 245). Important considerations in the preparation of liposome formulations are the lipid surface charge, vesicle size and the aqueous volume of the liposomes.

[0340] A positively charged synthetic cationic lipid, N-[1-(2,3-dioleyloxy)propyl]-N,N,N-trimethylammonium chloride (DOTMA) can be used to form small liposomes that interact spontaneously with nucleic acid to form lipid-nucleic acid complexes which are capable of fusing with the negatively charged lipids of the cell membranes of tissue culture cells, resulting in delivery of oligonucleotide (see, e.g., Feigner, P. L. et al., (1987) Proc. Natl. Acad. Sci. USA 8:7413-7417, and U.S. Pat. No. 4,897,355 for a description of DOTMA and its use with DNA).

[0341] A DOTMA analogue, 1,2-bis(oleoyloxy)-3-(trimethylammonia)propane (DOTAP) can be used in combination with a phospholipid to form DNA-complexing vesicles. LIPOFECTIN™ Bethesda Research Laboratories, Gaithersburg, Md.) is an effective agent for the delivery of highly anionic nucleic acids into living tissue culture cells that comprise positively charged DOTMA liposomes which interact spontaneously with negatively charged polynucleotides to form complexes. When enough positively charged liposomes are used, the net charge on the resulting complexes is also positive. Positively charged complexes prepared in this way spontaneously attach to negatively charged cell surfaces, fuse with the plasma membrane, and efficiently deliver functional nucleic acids into, for example, tissue culture cells. Another commercially available cationic lipid, 1,2-bis(oleoyloxy)-3,3-(trimethylammonia)propane (“DOTAP”) (Boehringer Mannheim, Indianapolis, Ind.) differs from DOTMA in that the oleoyl moieties are linked by ester, rather than ether linkages.

[0342] Other reported cationic lipid compounds include those that have been conjugated to a variety of moieties including, for example, carboxyspermine which has been conjugated to one of two types of lipids and includes compounds such as 5-carboxyspermylglycine dioctaoleoylamide (“DOGS”) (TRANSFECTAM™, Promega, Madison, Wis.) and dipalmitoylphosphatidylethanolamine 5-carboxyspermyl-amide (“DPPES”) (see, e.g., U.S. Pat. No. 5,171,678).

[0343] Another cationic lipid conjugate includes derivatization of the lipid with cholesterol (“DC-Chol”) which has been formulated into liposomes in combination with DOPE (See, Gao, X. and Huang, L., (1991) Biochim. Biophys. Res. Commun. 179:280). Lipopolylysine, made by conjugating polylysine to DOPE, has been reported to be effective for transfection in the presence of serum (Zhou, X. et al., (1991) Biochim. Biophys. Acta 1065:8). For certain cell lines, these liposomes containing conjugated cationic lipids, are said to exhibit lower toxicity and provide more efficient transfection than the DOTMA-containing compositions. Other commercially available cationic lipid products include DMRIE and DMRIE-HP (Vical, La Jolla, Calif.) and Lipofectamine (DOSPA) (Life Technology, Inc., Gaithersburg, Md.). Other cationic lipids suitable for the delivery of oligonucleotides are described in WO 98/39359 and WO 96/37194.

[0344] Liposomal formulations are particularly suited for topical administration, liposomes present several advantages over other formulations. Such advantages include reduced side effects related to high systemic absorption of the administered drug, increased accumulation of the administered drug at the desired target, and the ability to administer oligonucleotide into the skin. In some implementations, liposomes are used for delivering oligonucleotide to epidermal cells and also to enhance the penetration of oligonucleotide into dermal tissues, e.g., into skin. For example, the liposomes can be applied topically. Topical delivery of drugs formulated as liposomes to the skin has been documented (see, e.g., Weiner et al., (1992) Journal of Drug Targeting, vol. 2,405-410 and du Plessis et al., (1992) Antiviral Research, 18:259-265; Mannino, R. J. and Fould-Fogerite, S., (1998) Biotechniques 6:682-690; Itani, T. et al., (1987) Gene 56:267-276; Nicolau, C. et al. (1987) Meth. Enzymol. 149:157-176; Straubinger, R. M. and Papahadjopoulos, D. (1983) Meth. Enzymol. 101:512-527; Wang, C. Y. and Huang, L., (1987) Proc. Natl. Acad. Sci. USA 84:7851-7855).

[0345] Non-ionic liposomal systems have also been examined to determine their utility in the delivery of drugs to the skin, in particular systems comprising non-ionic surfactant and cholesterol. Non-ionic liposomal formulations comprising NOVASOME I (glyceryl dilaurate/cholesterol/polyoxyethylene-10-stearyl ether) and NOVASOME II (glyceryl distearate/cholesterol/polyoxyethylene-10-stearyl ether) were used to deliver a drug into the dermis of mouse skin. Such formulations with oligonucleotides are useful for treating a dermatological disorder.

[0346] The targeting of liposomes is also possible based on, for example, organ-specificity, cell-specificity, and organelle-specificity and is known in the art. In the case of a liposomal targeted delivery system, lipid groups can be incorporated into the lipid bilayer of the liposome in order to maintain the targeting ligand in stable association with the liposomal bilayer. Various linking groups can be used for joining the lipid chains to the targeting ligand. Additional methods are known in the art and are described, for example in U.S. Patent Application Publication No. 20060058255, the linking groups of which are herein incorporated by reference.

[0347] Liposomes that include oligonucleotides can be made highly deformable. Such deformability can enable the liposomes to penetrate through pore that are smaller than the average radius of the liposome. For example, transfersomes are yet another type of liposomes, and are highly deformable lipid aggregates which are attractive candidates for drug delivery vehicles. Transfersomes can be described as lipid droplets which are so highly deformable that they are easily able to penetrate through pores which are smaller than the droplet. Transfersomes can be made by adding surface edge activators, usually surfactants, to a standard liposomal composition. Transfersomes that include oligonucleotides can be delivered, for example, subcutaneously by infection in order to deliver oligonucleotides to keratinocytes in the skin. In order to cross intact mammalian skin, lipid vesicles must pass through a series of fine pores, each with a diameter less than 50 nm, under the influence of a suitable transdermal gradient. In addition, due to the lipid properties, these transfersomes can be self-optimizing (adaptive to the shape of pores, e.g., in the skin), self-repairing, and can frequently reach their targets without fragmenting, and often self-loading. Transfersomes have been used to deliver serum albumin to the skin. The transfersome-mediated delivery of serum albumin has been shown to be as effective as subcutaneous injection of a solution containing serum albumin.

[0348] Other formulations amenable to the present invention are described in PCT Publication Nos. WO 2009/088891, WO 2009/132131, and WO 2008/042973, which are hereby incorporated by reference in their entirety.

[0349] Surfactants find wide application in formulations such as emulsions (including microemulsions) and liposomes. The most common way of classifying and ranking the properties of the many different types of surfactants, both natural and synthetic, is by the use of the hydrophile/lipophile balance (HLB). The nature of the hydrophilic group (also known as the “head”) provides the most useful means for categorizing the different surfactants used in formulations (Rieger, in Pharmaceutical Dosage Forms, Marcel Dekker, Inc., New York, N.Y., 1988, p. 285).

[0350] If the surfactant molecule is not ionized, it is classified as a nonionic surfactant. Nonionic surfactants find wide application in pharmaceutical and cosmetic products and are usable over a wide range of pH values. In general, their HLB values range from 2 to about 18 depending on their structure. Nonionic surfactants include nonionic esters such as ethylene glycol esters, propylene glycol esters, glyceryl esters, polyglyceryl esters, sorbitan esters, sucrose esters, and ethoxylated esters. Nonionic alkanolamides and ethers such as fatty alcohol ethoxylates, propoxylated alcohols, and ethoxylated/propoxylated block polymers are also included in this class. The polyoxyethylene surfactants are the most popular members of the nonionic surfactant class.

[0351] If the surfactant molecule carries a negative charge when it is dissolved or dispersed in water, the surfactant is classified as anionic. Anionic surfactants include carboxylates such as soaps, acyl lactylates, acyl amides of amino acids, esters of sulfuric acid such as alkyl sulfates and ethoxylated alkyl sulfates, sulfonates such as alkyl benzene sulfonates, acyl isethionates, acyl taurates and sulfosuccinates, and phosphates. The most important members of the anionic surfactant class are the alkyl sulfates and the soaps.

[0352] If the surfactant molecule carries a positive charge when it is dissolved or dispersed in water, the surfactant is classified as cationic. Cationic surfactants include quaternary ammonium salts and ethoxylated amines. The quaternary ammonium salts are the most used members of this class.

[0353] If the surfactant molecule has the ability to carry either a positive or negative charge, the surfactant is classified as amphoteric. Amphoteric surfactants include acrylic acid derivatives, substituted alkylamides, N-alkylbetaines, and phosphatides.

[0354] The use of surfactants in drug products, formulations and in emulsions has been reviewed (Rieger, in Pharmaceutical Dosage Forms, Marcel Dekker, Inc., New York, N.Y., 1988, p. 285).

[0355] The oligonucleotides for use in the methods of the invention can also be provided as micellar formulations. Micelles are a particular type of molecular assembly in which amphipathic molecules are arranged in a spherical structure such that all the hydrophobic portions of the molecules are directed inward, leaving the hydrophilic portions in contact with the surrounding aqueous phase. The converse arrangement exists if the environment is hydrophobic.

[0356] Lipid Nanoparticle-Based Delivery Methods

[0357] Oligonucleotides of in the invention may be fully encapsulated in a lipid formulation, e.g., a lipid nanoparticle (LNP), or other nucleic acid-lipid particle. LNPs are extremely useful for systemic applications, as they exhibit extended circulation lifetimes following intravenous (i.v.) injection and accumulate at distal sites (e.g., sites physically separated from the administration site). LNPs include “pSPLP,” which include an encapsulated condensing agent-nucleic acid complex as set forth in PCT Publication No. WO 00/03683. The particles of the present invention typically have a mean diameter of about 50 nm to about 150 nm, more typically about 60 nm to about 130 nm, more typically about 70 nm to about 110 nm, most typically about 70 nm to about 90 nm, and are substantially nontoxic. In addition, the nucleic acids when present in the nucleic acid-lipid particles of the present invention are resistant in aqueous solution to degradation with a nuclease. Nucleic acid-lipid particles and their method of preparation are disclosed in, e.g., U.S. Pat. Nos. 5,976,567; 5,981,501; 6,534,484; 6,586,410; 6,815,432; U.S. Publication No. 2010/0324120 and PCT Publication No. WO 96/40964.

[0358] In one embodiment, the lipid to drug ratio (mass/mass ratio) (e.g., lipid to oligonucleotide ratio) will be in the range of from about 1:1 to about 50:1, from about 1:1 to about 25:1, from about 3:1 to about 15:1, from about 4:1 to about 10:1, from about 5:1 to about 9:1, or about 6:1 to about 9:1. Ranges intermediate to the above recited ranges are also contemplated to be part of the invention.

[0359] Non-limiting examples of cationic lipids include N,N-dioleyl-N,N-dimethylammonium chloride (DODAC), N,N-distearyl-N,N-dimethylammonium bromide (DDAB), N—(I-(2,3-dioleoyloxy)propyl)-N,N,N-trimethylammonium chloride (DOTAP), N—(I-(2,3-dioleyloxy)propyl)-N,N,N-trimethylammonium chloride (DOTMA), N,N-dimethyl-2,3-dioleyloxy)propylamine (DODMA), 1,2-DiLinoleyloxy-N,N-dimethylaminopropane (DLinDMA), 1,2-Dilinolenyloxy-N,N-dimethylaminopropane (DLenDMA), 1,2-Dilinoleylcarbamoyloxy-3-dimethylaminopropane (DLin-C-DAP), 1,2-Dilinoleyoxy-3-(dimethylamino)acetoxypropane (DLin-DAC), 1,2-Dilinoleyoxy-3-morpholinopropane (DLin-MA), 1,2-Dilinoleoyl-3-dimethylaminopropane (DLinDAP), 1,2-Dilinoleylthio-3-dimethylaminopropane (DLin-S-DMA), 1-Linoleoyl-2-linoleyloxy-3-dimethylaminopropane (DLin-2-DMAP), 1,2-Dilinoleyloxy-3-trimethylaminopropane chloride salt (DLin-TMA.Cl), 1,2-Dilinoleoyl-3-trimethylaminopropane chloride salt (DLin-TAP.Cl), 1,2-Dilinoleyloxy-3-(N-methylpiperazino)propane (DLin-MPZ), or 3-(N,N-Dilinoleylamino)-1,2-propanediol (DLinAP), 3-(N,N-Dioleylamino)-1,2-propanedio (DOAP), 1,2-Dilinoleyloxo-3-(2-N,N-dimethylamino)ethoxypropane (DLin-EG-DMA), 1,2-Dilinolenyloxy-N,N-dimethylaminopropane (DLinDMA), 2,2-Dilinoleyl-4-dimethylaminomethyl-[1,3]-dioxolane (DLin-K-DMA) or analogs thereof, (3aR,5s,6aS)—N,N-dimethyl-2,2-di((9Z,12Z)-octadeca-9,12-dienyetetrahydro-3aH-cyclopenta[d][1,3]dioxol-5-amine (ALN100), (6Z,9Z,28Z,31Z)-heptatriaconta-6,9,28,31-tetraen-19-yl4-(dimethylamino)bu-tanoate (MC3), 1,1′-(2-(4-(2-((2-(bis(2-hydroxydodecyl)amino)ethyl)(2-hydroxydodecyl)ami-no)ethyl)piperazin-1-yeethylazanediyedidodecan-2-ol (Tech G1), or a mixture thereof. The cationic lipid can comprise, for example, from about 20 mol % to about 50 mol % or about 40 mol % of the total lipid present in the particle.

[0360] The ionizable/non-cationic lipid can be an anionic lipid or a neutral lipid including, but not limited to, distearoylphosphatidylcholine (DSPC), dioleoylphosphatidylcholine (DOPC), dipalmitoylphosphatidylcholine (DPPC), dioleoylphosphatidylglycerol (DOPG), dipalmitoylphosphatidylglycerol (DPPG), dioleoyl-phosphatidylethanolamine (DOPE), palmitoyloleoylphosphatidylcholine (POPC), palmitoyloleoylphosphatidylethanolamine (POPE), dioleoyl-phosphatidylethanolamine 4-(N-maleimidomethyl)-cyclohexane-1-carboxylate (DOPE-mal), dipalmitoyl phosphatidyl ethanolamine (DPPE), dimyristoylphosphoethanolamine (DMPE), distearoyl-phosphatidyl-ethanolamine (DSPE), 16-O-monomethyl PE, 16-O-dimethyl PE, 18-1-trans PE, 1-stearoyl-2-oleoyl-phosphatidyethanolamine (SOPE), cholesterol, or a mixture thereof. The non-cationic lipid can be, for example, from about 5 mol % to about 90 mol %, about 10 mol %, or about 60 mol % if cholesterol is included, of the total lipid present in the particle.

[0361] The conjugated lipid that inhibits aggregation of particles can be, for example, a polyethyleneglycol (PEG)-lipid including, without limitation, a PEG-diacylglycerol (DAG), a PEG-dialkyloxypropyl (DAA), a PEG-phospholipid, a PEG-ceramide (Cer), or a mixture thereof. The PEG-DAA conjugate can be, for example, a PEG-dilauryloxypropyl (C₁₂), a PEG-dimyristyloxypropyl (C₁₄), a PEG-dipalmityloxypropyl (C₁₆), or a PEG-distearyloxypropyl (C₁₈). The conjugated lipid that prevents aggregation of particles can be, for example, from 0 mol % to about 20 mol % or about 2 mol % of the total lipid present in the particle.

[0362] In some embodiments, the nucleic acid-lipid particle further includes cholesterol at, e.g., about 10 mol % to about 60 mol % or about 50 mol % of the total lipid present in the particle.

[0363] Combination Therapies

[0364] A method of the invention can be used alone or in combination with an additional therapeutic agent, e.g., other agents that treat KCNT1 related disorders or symptoms associated therewith, or in combination with other types of therapies to treat KCNT1 related disorders. In combination treatments, the dosages of one or more of the therapeutic compounds may be reduced from standard dosages when administered alone. For example, doses may be determined empirically from drug combinations and permutations or may be deduced by isobolographic analysis (e.g., Black et al., Neurology 65:S3-S6 (2005)). In this case, dosages of the compounds when combined should provide a therapeutic effect.

[0365] In some embodiments, the oligonucleotide agents described herein may be used in combination with an additional therapeutic agent to treat a KCNT1 related disorder. In some embodiments, the additional therapeutic agent may be an oligonucleotide (e.g., an ASO) that hybridizes with the mRNA of gene associated with a KCNT1 related disorder.

[0366] In some embodiments, the second therapeutic agent is a chemotherapeutic agent (e.g., a cytotoxic agent or other chemical compound useful in the treatment of a KCNT1 related disorder).

[0367] The second agent may be a therapeutic agent which is a non-drug treatment. For example, the second therapeutic agent is physical therapy.

[0368] In any of the combination embodiments described herein, the first and second therapeutic agents may be administered simultaneously or sequentially, in either order. The first therapeutic agent may be administered immediately, up to 1 hour, up to 2 hours, up to 3 hours, up to 4 hours, up to 5 hours, up to 6 hours, up to 7 hours, up to, 8 hours, up to 9 hours, up to 10 hours, up to 11 hours, up to 12 hours, up to 13 hours, 14 hours, up to hours 16, up to 17 hours, up 18 hours, up to 19 hours up to 20 hours, up to 21 hours, up to 22 hours, up to 23 hours up to 24 hours or up to 1-7, 1-14, 1-21 or 1-30 days before or after the second therapeutic agent.

[0369] Pharmaceutical Compositions

[0370] In some embodiments, the oligonucleotides described herein are formulated into pharmaceutical compositions for administration to human subjects in a biologically compatible form suitable for administration in vivo.

[0371] The compounds described herein may be used in the form of the free base, in the form of salts, solvates, and as prodrugs. All forms are within the methods described herein. In accordance with the methods of the invention, the described compounds or salts, solvates, or prodrugs thereof may be administered to a subject in a variety of forms depending on the selected route of administration, as will be understood by those skilled in the art. The compounds described herein may be administered, for example, by oral, parenteral, intrathecal, intracerebroventricular, intraparenchymal, buccal, sublingual, nasal, rectal, patch, pump, or transdermal administration and the pharmaceutical compositions formulated accordingly. Parenteral administration includes intravenous, intraperitoneal, subcutaneous, intramuscular, transepithelial, nasal, intrapulmonary, intrathecal, intracerebroventricular, intraparenchymal, rectal, and topical modes of administration. Parenteral administration may be by continuous infusion over a selected period of time.

[0372] A compound described herein may be orally administered, for example, with an inert diluent or with an assimilable edible carrier, or it may be enclosed in hard or soft shell gelatin capsules, or it may be compressed into tablets, or it may be incorporated directly with the food of the diet. For oral therapeutic administration, a compound described herein may be incorporated with an excipient and used in the form of ingestible tablets, buccal tablets, troches, capsules, elixirs, suspensions, syrups, and wafers. A compound described herein may also be administered parenterally. Solutions of a compound described herein can be prepared in water suitably mixed with a surfactant, such as hydroxypropylcellulose. Dispersions can also be prepared in glycerol, liquid polyethylene glycols, DMSO, and mixtures thereof with or without alcohol, and in oils. Under ordinary conditions of storage and use, these preparations may contain a preservative to prevent the growth of microorganisms. Conventional procedures and ingredients for the selection and preparation of suitable formulations are described, for example, in Remington's Pharmaceutical Sciences (2012, 22nd ed.) and in The United States Pharmacopeia: The National Formulary (USP 41 NF 36), published in 2018. The pharmaceutical forms suitable for injectable use include sterile aqueous solutions or dispersions and sterile powders for the extemporaneous preparation of sterile injectable solutions or dispersions. In all cases the form must be sterile and must be fluid to the extent that may be easily administered via syringe. Compositions for nasal administration may conveniently be formulated as aerosols, drops, gels, and powders. Aerosol formulations typically include a solution or fine suspension of the active substance in a physiologically acceptable aqueous or non-aqueous solvent and are usually presented in single or multidose quantities in sterile form in a sealed container, which can take the form of a cartridge or refill for use with an atomizing device. Alternatively, the sealed container may be a unitary dispensing device, such as a single dose nasal inhaler or an aerosol dispenser fitted with a metering valve which is intended for disposal after use. Where the dosage form includes an aerosol dispenser, it will contain a propellant, which can be a compressed gas, such as compressed air or an organic propellant, such as fluorochlorohydrocarbon. The aerosol dosage forms can also take the form of a pump-atomizer. Compositions suitable for buccal or sublingual administration include tablets, lozenges, and pastilles, where the active ingredient is formulated with a carrier, such as sugar, acacia, tragacanth, gelatin, and glycerine. Compositions for rectal administration are conveniently in the form of suppositories containing a conventional suppository base, such as cocoa butter

[0373] The compounds described herein may be administered to an animal, e.g., a human, alone or in combination with pharmaceutically acceptable carriers, as noted herein, the proportion of which is determined by the solubility and chemical nature of the compound, chosen route of administration, and standard pharmaceutical practice.

[0374] Dosages

[0375] The dosage of the compositions (e.g., a composition including an oligonucleotide) described herein, can vary depending on many factors, such as the pharmacodynamic properties of the compound; the mode of administration; the age, health, and weight of the recipient; the nature and extent of the symptoms; the frequency of the treatment, and the type of concurrent treatment, if any; and the clearance rate of the compound in the animal to be treated. The compositions described herein may be administered initially in a suitable dosage that may be adjusted as required, depending on the clinical response. In some embodiments, the dosage of a composition (e.g., a composition including an oligonucleotide) is a prophylactically or a therapeutically effective amount.

[0376] Kits

[0377] The invention also features kits including (a) a pharmaceutical composition including an oligonucleotide agent that reduces the level and/or activity of KCNT1 in a cell or subject described herein, and (b) a package insert with instructions to perform any of the methods described herein. In some embodiments, the kit includes (a) a pharmaceutical composition including an oligonucleotide agent that reduces the level and/or activity of KCNT1 in a cell or subject described herein, (b) an additional therapeutic agent, and (c) a package insert with instructions to perform any of the methods described herein.

[0378] Methods of Selecting ASOs

[0379] Oligonucleotides suitable for use in ASO treatment may be selected using bionformatic methods. Oligonucleotides may be from 18-22 nucleotides in length. The oligonucleotides may have a GC content of from about 40% to about 70% (e.g., 45%, 50%, 55%, 60%, 65%, or 70%). The oligonucleotides may include 3 or fewer (e.g., 2, 1, or 0) mismatches to human KCNT1. In some embodiments, the oligonucleotide may include at least 85%, at least 86%, at least 87%, at least 88%, at least 89%, at least 90%, at least 91%, at least 92%, at least 93%, at least 94%, at least 95%, at least 96%, at least 97%, at least 98%, or at least 99% sequence identity to an equal length target of mouse KCNT1. In some embodiments, the oligonculeotide may include a sequence with 100% sequence identity to an equal length target of mouse KCNT1. In some embodiments, the oligonucleotide may include at least 85%, at least 86%, at least 87%, at least 88%, at least 89%, at least 90%, at least 91%, at least 92%, at least 93%, at least 94%, at least 95%, at least 96%, at least 97%, at least 98%, or at least 99% sequence identity to an equal length target of cynomolgus monkey KCNT1. In some embodiments, the oligonculeotide may include a sequence with 100% sequence identity to an equal length target of cynomolgus monkey KCNT1. The oligonucleotide may include 85%, at least 86%, at least 87%, at least 88%, at least 89%, at least 90%, at least 91%, at least 92%, at least 93%, at least 94%, at least 95%, at least 96%, at least 97%, at least 98%, or at least 99% sequence identity to an equal length target of mouse and cynomolgus monkey KCNT1. In some embodiments, the oligonculeotide may include a sequence with 100% sequence identity to an equal length target of mouse and cynomolgus monkey KCNT1. The oligonucleotides may include at least 3 (e.g., 4, 5, 6, 7, 8, 9, 10, or more) mismatches to non KCNT1 transcripts. The oligonucleotides may not form dimers. The oligonucleotides may not form hairpins. The oligonucleotides may lack polyG runs, such as GGGG.

[0380] In some embodiments, an oligonucleotide comprises at least 10 contiguous nucleobases which is at least 90%, at least 91%, at least 92%, at least 93%, at least 94%, at least 95%, at least 96%, at least 97%, at least 98%, or at least 99% complementary to an equal length portion of nucleobases within a 10 nucleobase range of any one of positions 1-4770 or SED ID NO: 3526. In some embodiments, an oligonucleotide comprises at least 11, 12, 13, 14, 15, 16, 17, 18, 19, or 20 contiguous nucleobases which is at least 90%, at least 91%, at least 92%, at least 93%, at least 94%, at least 95%, at least 96%, at least 97%, at least 98%, or at least 99% complementary to an equal length portion of nucleobases within a nucleobase range of any one of positions 1-4770 or SED ID NO: 3526. In some embodiments, an oligonucleotide comprises at least 10 contiguous nucleobases which is at least 90%, at least 91%, at least 92%, at least 93%, at least 94%, at least 95%, at least 96%, at least 97%, at least 98%, or at least 99 complementary to an equal length portion of nucleobases within a 10 nucleobase range of any one of positions 374, 661, 655-680, 765, 837, 1347, 1340-1370, 1629, 1760, 1752, 1795, 1775, 1740-1815, 2879, 3008, 3168, or 3110-3171 of SEQ ID NO: 3526. In some embodiments, an oligonucleotide comprises at least 11, 12, 13, 14, 15, 16, 17, 18, 19, or 20 contiguous nucleobases which are at least 90%, at least 91%, at least 92%, at least 93%, at least 94%, at least 95%, at least 96%, at least 97%, at least 98%, or at least 99% complementary to an equal length portion of nucleobases of any one of positions 374, 661, 655-680, 765, 837, 1347, 1340-1370, 1629, 1760, 1752, 1795, 1775, 1740-1815, 2879, 3008, 3168, or 3110-3171 of SEQ ID NO: 3526. In some embodiments, the oligonucleotide comprises at least 10 contiguous nucleobases that are at least 90%, at least 91%, at least 92%, at least 93%, at least 94%, at least 95%, at least 96%, at least 97%, at least 98%, or at least 99% complementary to an equal length portion of nucleobases within any one of positions 655-680, 1340-137, 1740-1815, or 3110-3175 of SEQ ID NO: 3526. In some embodiments, an oligonucleotide comprises at least 11, 12, 13, 14, 15, 16, 17, 18, 19, or 20 contiguous nucleobases that are at least 90%, at least 91%, at least 92%, at least 93%, at least 94%, at least 95%, at least 96%, at least 97%, at least 98%, or at least 99% complementary to an equal length portion of nucleobases within any one of positions 655-680, 1340-137, 1740-1815, or 3110-3175 of SEQ ID NO: 3526. In some embodiments, the oligonucleotide comprises at least 10 contiguous nucleobases that are complementary to an equal length portion of nucleobases within any one of positions 655-665, 660-670, 665-675, 670-680, 1340-1350, 1345-1355, 1350-1360, 1355-1365, 1360-1370, 1740-1750, 1745-1755, 1750-1760, 1755-1765, 1760-1770, 1765-1775, 1770-1780, 1775-1785, 1780-1790, 1785-1795, 1790-1800, 1795-1805, 1800-1810, 1805-1815, 3110-3120, 3115-3125, 3120-3130, 3125-3135, 3130-3140, 3135-3145, 3140-3150, 3145-3155, 3150-3160, 3155-3165, 3160-3170, 3165-3175, or 3170-3180 of SEQ ID NO: 3526. In some embodiments, an oligonucleotide comprises at least 11, 12, 13, 14, 15, 16, 17, 18, 19, or 20 contiguous nucleobases that are complementary to an equal length portion of nucleobases within any one of positions 655-665, 660-670, 665-675, 670-680, 1340-1350, 1345-1355, 1350-1360, 1355-1365, 1360-1370, 1740-1750, 1745-1755, 1750-1760, 1755-1765, 1760-1770, 1765-1775, 1770-1780, 1775-1785, 1780-1790, 1785-1795, 1790-1800, 1795-1805, 1800-1810, 1805-1815, 3110-3120, 3115-3125, 3120-3130, 3125-3135, 3130-3140, 3135-3145, 3140-3150, 3145-3155, 3150-3160, 3155-3165, 3160-3170, 3165-3175, or 3170-3180 of SEQ ID NO: 3526.

[0381] The position of SEQ ID NO: 3526 refers to the nucleotide position of the KCNT1 transcript. For instance, the nucleotide at position 1261 of KCNT1 transcript (SEQ ID NO: 3526) is an adenine. Any of the antisense oligonucleotides described herein can bind to at least 4, 5, 6, 7, 8, 9, 10, 11, 12, 13, 14, or 15 contiguous nucleobases of any position of KCNT1 transcript or KCNT1 transcript variant. The oligonucleotide can comprise at least 10 contiguous nucleobases which are at least 90%, at least 91%, at least 92%, at least 93%, at least 94%, at least 95%, at least 96%, at least 97%, at least 98%, or at least 99% complementary to an equal length portion of nucleobases within a 1, 2, 3, 4, 5, 6, 7, 8, 9, 10, 11, 12, 13, 14, 15, 16, 17, 18, or 19 nucleobase range of any position of KCNT1 transcript or KCNT1 transcript variant. In some embodiments, the oligonucleotide comprises at least 10 contiguous nucleobases, at least 11 contiguous nucleobases, at least 12 contiguous nucleobases, at least 13 contiguous nucleobases, at least 14 contiguous nucleobases, at least 15 contiguous nucleobases, at least 16 contiguous nucleobases, at least 17 contiguous nucleobases, at least 18 contiguous nucleobases, at least 19 contiguous nucleobases, or at least 20 contiguous nucleobases, which are at least 90% complementary to an equal length portion of nucleobases within a 10 nucleobase range of any position of KCNT1 transcript or KCNT1 transcript variant. For example, a 20 nucleobase oligonucleotide that is at least 90% complementary to the 10 nucleobases at position 220-230 of KCNT1 transcript or transcript variant is within a 10 nucleobase range of positions 211-239 of KCNT1 transcript or KCNT1 transcript variant. In some embodiments, the oligonucleotide binding overlaps with the KCNT1 transcript or KCNT1 transcript variant nucleobase position. For example, a 20 nucleobase oligonucleotide that is complementary to position 500 of KCNT1 transcript or KCNT1 transcript variant can hybridize to the nucleobases 481-500, 483-503, 490-510, 497-517, or 500-519, or any range therein of the KCNT1 transcript or KCNT1 transcript variant nucleotide positions.

[0382] Assessment of ASOs

[0383] The activity of the antisense oligonucleotides of the present disclosure can be assessed and confirmed using various techniques known in the art. For example, the ability of the antisense oligonucleotides to inhibit KCNT1 expression and/or whole cell current can be assessed in in vitro assays to confirm that the antisense oligonucleotides are suitable for use in treating a disease or condition associated with a gain-of-function mutation in KCNT1 and/or excessive neuronal excitability. Mouse models can be used to not only assess the ability of the antisense oligonucleotides to inhibit KCNT1 expression or whole cell current, but to also ameliorate symptoms associated with gain-of-function KCNT1 mutations and/or excessive neuronal excitability.

[0384] In one example, cells such as mammalian cells (e.g. CHO cells) that are transfected with KCNT1 and express this gene are also transfected with an antisense oligonucleotide of the present disclosure. Typically, the KCNT1 contains a gain-of-function mutation. In another example, a human neuronal cell line (e.g. SH-SY5Y) that naturally expresses native wild type KCNT1 is used. Optionally, the genome of this cell is edited so as to contain a gain-of-function mutation, such that the resulting KCNT1 is a disease-causing variant. The levels of KCNT1 mRNA can be assessed using qRT-PCR or Northern blot as is well known in the art. The level of expression of protein from KCNT1 can be assessed by Western blot on total cell lysates or fractions as described in Rizzo et al. (Mol Cell Neurosci. 72:54-63, 2016). Residual function of the KCNT1-encoded channels can also be assessed using electrophysiology or ion flux assay.

[0385] In a particular examples, the activity of the antisense oligonucleotides of the present disclosure are assessed and confirmed using stem cell modelling (for review, see e.g. Tidball and Parent Stem Cells 34:27-33, 2016; Parent and Anderson Nature Neuroscience 18:360-366, 2015). For example, human induced pluripotent stem cells (iPSCs) can be produced from somatic cells (e.g. dermal fibroblasts or blood-derived hematopoietic cells) derived from a patient with a KCNT1 gain-of-function mutation and presenting with an associated disease or condition (e.g. EIMFS, ADNFLE or West syndrome). Optionally, genome editing can be used to revert the gain-of-function mutation to wild-type to produce an isogenic control cell line (Gaj et al. Trends Biotechnol 31, 397-405, 2013), which can also be used to determine desirable wild-type levels of activity for subsequent assessment and comparison of oligonucleotides. Alternatively, genome editing can be used to introduce a gain-of-function mutation into the KCNT1 gene of wild-type, control iPSCs (e.g. a reference iPSC line). The iPSCs containing the gain-of-function mutation, and optionally the isogenic control, can then be differentiated into neurons, including excitatory neurons, using known techniques (see e.g. Kim et al. Front Cell Neurosci 8:109, 2014; Zhang et al. 2013, Chambers et al. Nat Biotechnol 27, 275-280, 2009). The effect of the antisense oligonucleotides of the present invention on KCNT1 expression (as assessed by KCNT1 mRNA or protein levels) and/or activity (as assessed by ion flux assay and/or electrophysiology, e.g. using the whole cell patch clamp technique, the single electrode voltage clamp technique or the two-electrode voltage clamp (TEVC) technique) can then be assessed following exposure of the iPSCs to the antisense oligonucleotides of the present invention.

[0386] The levels of KCNT1 expression (mRNA or protein) or whole cell current observed when cells expressing KCNT1 are exposed to an antisense oligonucleotide of the present disclosure are compared to the respective levels observed when cells expressing KCNT1 are exposed with a negative control antisense oligonucleotide, so as to determine the level of inhibition resulting from the antisense oligonucleotide of the present disclosure. Typically, expression levels of KCIVT1 or whole cell current levels are reduced by at least or about 20%, 25%, 30%, 35%, 40%, 45%, 50%, 55%, 60%, 65%, 70%, 75%, 80%, 85%, 90% or more. Accordingly, the antisense oligonucleotides of the present disclosure can be used for treating a disease or condition associated with a gain-of-function mutation in KCNT1.

[0387] Mouse models can also be used to assess and confirm the activity of the antisense oligonucleotides of the present disclosure. For example, knock-in or transgenic mouse models can be generated using KCNT1 genes containing a gain-of-function mutation in a similar manner to that described for SCN1A and SCN2A knock-in and transgenic mouse models (see e.g. Kearney et al. Neuroscience 102, 307-317, 2001; Ogiwara et al. J Neurosci 27:5903-5914, 2007; Yu et al. Nat Neurosci 9:1142-1149, 2006). In particular examples, a KCNT1 gene that matches the particular antisense oligonucleotide (e.g. an allele-specific oligonucleotide) is used to produce the knock-in or transgenic mouse. The gain-of-function KCNT1 knock-in or transgenic mice may present with a phenotype similar to EIMFS, ADNFLE and/or West syndrome, including, for example, increased neuronal activity, spontaneous seizures, and heterogeneous focal seizure activity on electroencephalogram (EEG). In other examples, SCN1A and SCN2A knock-in and transgenic mouse models may be used for models exhibiting excessive neuronal excitability. The ability of the antisense oligonucleotides of the present invention to inhibit expression of KCNT1 in these mice and to ameliorate any symptoms associated with the gain-of-function KCNT1 mutations and/or excessive neuronal excitability in the mice, can then be assessed.

[0388] For example, the levels of KCNT1 mRNA and/or protein can be assessed following administration of an antisense oligonucleotide of the present disclosure or a negative control antisense oligonucleotide to the mice. In a particular example, KCNT1 mRNA and/or protein levels in the brain, and in particular the neurons, are assessed. The levels of KCNT1 expression following administration of an antisense oligonucleotide of the present disclosure are compared to the respective levels observed when a negative control antisense oligonucleotide is administered, so as to determine the level of inhibition resulting from the antisense oligonucleotide of the present disclosure. Typically, expression levels of KCNT1 in the mice (e.g. in the brains of the mice) are reduced by at least or about 20%, 25%, 30%, 35%, 40%, 45%, 50%, 55%, 60%, 65%, 70%, 75%, 80%, 85%, 90% or more.

[0389] In another example, the functional effect of administration of an antisense oligonucleotide of the present disclosure is assessed. For example, the number, severity and/or type of seizures can be assessed visually and/or by EEG. Neuronal excitability can also be assessed, such as by excising brain slices from mice administered an antisense oligonucleotide of the present disclosure or a negative control antisense oligonucleotide and assessing whole cell current (e.g. using the whole cell patch clamp technique). Similar neuronal excitability analyses can be performed using neurons isolated from the mice and then cultured. Additionally, mouse behavior, including gait characteristics, can be assessed to determine the functional effect of administration of an antisense oligonucleotide of the present disclosure.

### Additional Embodiments

[0390] Disclosed herein is a single-stranded oligonucleotide of 18-22 linked nucleosides in length comprising a GC content from 40% to 70% and having at least 85% sequence identity to an equal length portion of H. sapiens KCNT1 and M. musculus KCNT1.

[0391] Additionally disclosed herein is a single-stranded oligonucleotide of 18-22 linked nucleosides in length comprising a GC content from 40% to 70% and having at least 85% sequence identity to an equal length portion of H. sapiens KCNT1 and M. cynomolgus KCNT1.

[0392] Additionally disclosed herein is a single-stranded oligonucleotide of 18-22 linked nucleosides in length comprising a GC content from 40% to 70% and having at least 85% sequence identity to an equal length portion of H. sapiens KCNT1, M. musculus KCNT1, and M. cynomolgus KCNT1.

[0393] In one aspect, the oligonucleotide comprises no more than 2 mismatches to H. sapiens KCNT1. In one aspect, the oligonucleotide comprises at least 3 mismatches to any non KCNT1 transcript. In one aspect, the oligonucleotide lacks a GGGG tetrad.

[0394] Additionally disclosed herein is a single-stranded oligonucleotide of 18-22 linked nucleosides in length comprising a region of at least 18 contiguous nucleobases of any one of SEQ ID NOs: 1-3409. In one aspect, the region of at least 10 nucleobases has at least 90% complementary to an equal length portion of any one of SEQ ID NOs: 1-3409. In one aspect, the region of at least 10 nucleobases has at least 95% complementary to an equal length portion of any one of SEQ ID NOs: 1-3409. In one aspect, the oligonucleotide comprises the nucleobase sequence of any one of SEQ ID NOs: 1-3409. In one aspect, the nucleobase sequence of the oligonucleotide consists of any one of SEQ ID NOs: 1-3409.

[0395] In one aspect, the oligonucleotide comprises: (a) a gap segment comprising linked deoxyribonucleosides; (b) a 5′ wing segment comprising linked nucleosides; and (c) a 3′ wing segment comprising linked nucleosides; wherein the gap segment comprises a region of at least 10 contiguous nucleobases having at least 80% complementarity to an equal length portion of any one of SEQ ID NOs: 1-3409 positioned between the 5′ wing segment and the 3′ wing segment; wherein the 5′ wing segment and the 3′ wing segment each comprises at least two linked nucleosides; and wherein at least one nucleoside of each wing segment comprises an alternative nucleoside.

[0396] In one aspect, the oligonucleotide comprises at least one alternative internucleoside linkage. In one aspect, the at least one alternative internucleoside linkage is a phosphorothioate internucleoside linkage. In one aspect, the at least one alternative internucleoside linkage is a 2′-alkoxy internucleoside linkage. In one aspect, the at least one alternative internucleoside linkage is an alkyl phosphate internucleoside linkage. In one aspect, the oligonucleotide comprises at least one alternative nucleobase. In one aspect, the alternative nucleobase is 5′-methylcytosine, pseudouridine, or 5-methoxyuridine. In one aspect, the oligonucleotide comprises at least one alternative sugar moiety. In one aspect, the alternative sugar moiety is 2′-OMe or a bicyclic nucleic acid. In one aspect, the oligonucleotide further comprises a ligand conjugated to the 5′ end or the 3′ end of the oligonucleotide through a monovalent or branched bivalent or trivalent linker.

[0397] In one aspect, the oligonucleotide comprises a region complementary to at least 17 contiguous nucleotides of a KCNT1 gene. In one aspect, the oligonucleotide comprises a region complementary to at least 19 contiguous nucleotides of a KCNT1 gene. In one aspect, the oligonucleotide comprises a region of at least 18 contiguous nucleobases of any one of SEQ ID NOs: 1-17 and 19-50. In one aspect, the oligonucleotide comprises a region of at least 18 contiguous nucleobases of SEQ ID NO: 18. In one aspect, the oligonucleotide comprises a region of at least 18 contiguous nucleobases of any one of SEQ ID NOs: 51-81, 83-86, and 88-96. In one aspect, the oligonucleotide comprises a region of at least 18 contiguous nucleobases of any one of SEQ ID NOs: 82 and 87. In one aspect, the oligonucleotide comprises a region of at least 18 contiguous nucleobases of any one of SEQ ID NOs: 97-116.

[0398] Additionally disclosed herein is a pharmaceutical composition comprising the oligonucleotide and a pharmaceutically acceptable carrier or excipient. Additionally disclosed herein is a composition comprising the oligonucleotide of any one of claims 1-28 and a lipid nanoparticle, a polyplex nanoparticle, a lipoplex nanoparticle, or a liposome. Additionally disclosed herein is a method of treating, preventing, or delaying the progression of a KCNT1 related disorder in a subject in need thereof, the method comprising administering to the subject the oligonucleotide, the pharmaceutical composition, or the composition in an amount and for a duration sufficient to treat, prevent, or delay the progression of the KCNT1 related disorder.

[0399] Additionally disclosed herein is a method of treating, preventing, or delaying the progression of a KCNT1 related disorder in a subject comprising: (a) selecting a single-stranded oligonucleotide of 18-22 linked nucleosides in length comprising a GC content from 40% to 70%, wherein the oligonucleotide: (i) has at least 85% sequence identity to an equal length portion of H. sapiens KCNT1 and M. musculus KCNT1; (ii) has at least 85% sequence identity to an equal length portion of H. sapiens KCNT1 and M. cynomolgus KCNT1; or (iii) has at least 85% sequence identity to an equal length portion of H. sapiens KCNT1, M. musculus KCNT1, and M. cynomolgus KCNT1; and (b) administering the oligonucleotide to the subject in an amount and for a duration sufficient to treat, prevent, or delay the progression of the KCNT1 related disorder.

[0400] In one aspect, the oligonucleotide comprises no more than 2 mismatches to H. sapiens KCNT1. In one aspect, the oligonucleotide comprises at least 3 mismatches to any non KCNT1 transcript. In one aspect, the oligonucleotide lacks a GGGG tetrad.

[0401] Additionally disclosed herein is a method of inhibiting transcription of KCNT1 in a cell, the method comprising contacting the cell with the oligonucleotide, the pharmaceutical composition, or the composition in an amount and for a duration sufficient to obtain degradation of an mRNA transcript of the KCNT1 gene, wherein the oligonucleotide inhibits expression of the KCNT1 gene in the cell.

[0402] Additionally disclosed herein is a method of reducing a level and/or activity of KCNT1 in a cell of a subject having a KCNT1 related disorder, the method comprising contacting the cell with the oligonucleotide, the pharmaceutical composition, or the composition in an amount and for a duration sufficient to reduce the level and/or activity of KCNT1 in the cell. In one aspect, the subject is a human. In one aspect, the cell is a cell of the central nervous system. In one aspect, the KCNT1 related disorder is selected from the group consisting of epilepsy of infancy with migrating focal seizures, autosomal dominant nocturnal frontal lobe epilepsy, West syndrome, infantile spasms, epileptic encephalopathy, focal epilepsy, Ohtahara syndrome, developmental epileptic encephalopathy, and Lennox Gastaut syndrome. In one aspect, the subject has a gain-of-function mutation in KCNT1. In one aspect, the gain-of-function mutation is selected from the group consisting of V271F, L274I, G288S, F346L, R398Q, R428Q, R474H, F502V, M516V, K629N, I760M, Y796H, E893K, M896I, M896K, P924L, R928C, F932I, A934T, A966T, H257D, R262Q, Q270E, V340M, C377S, P409S, L437F, R474C, A477T, R565H, K629E, G652V, I760F, Q906H, R933G, R950Q, R961H, R1106Q, K1154Q, R474Q, Y1903C, H469L, M896R, K946E, and R950L. In one aspect, the method reduces one or more symptoms of the KCNT1 related disorder. In one aspect, the one or more symptoms of the KCNT1 related disorder is selected from the group consisting of prolonged seizures, frequent seizures, behavioral and developmental delays, movement and balance issues, orthopedic conditions, delayed language and speech issues, growth and nutrition issues, sleeping difficulties, chronic infection, sensory integration disorder, disruption of the autonomic nervous system, and sweating.

[0403] Additionally disclosed herein is a single-stranded oligonucleotide of 18-22 linked nucleosides in length comprising a GC content from 40% to 70% and having at least 85% sequence identity to an equal length portion of H. sapiens KCNT1 and M. musculus KCNT1. Additionally disclosed herein is a single-stranded oligonucleotide of 18-22 linked nucleosides in length comprising a GC content from 40% to 70% and having at least 85% sequence identity to an equal length portion of H. sapiens KCNT1 and M. cynomolgus KCNT1. Additionally disclosed herein is a single-stranded oligonucleotide of 18-22 linked nucleosides in length comprising a GC content from 40% to 70% and having at least 85% sequence identity to an equal length portion of H. sapiens KCNT1, M. musculus KCNT1, and M. cynomolgus KCNT1.

[0404] Additionally disclosed herein is a single-stranded oligonucleotide of 18-22 linked nucleosides in length comprising a GC content from 40% to 70% and having at least 85% sequence identity to an equal length portion of H. sapiens KCNT1 and M. musculus KCNT1. Additionally disclosed herein is a single-stranded oligonucleotide of 18-22 linked nucleosides in length comprising a GC content from 40% to 70% and having at least 85% sequence identity to an equal length portion of H. sapiens KCNT1 and M. cynomolgus KCNT1. Additionally disclosed herein is a single-stranded oligonucleotide of 18-22 linked nucleosides in length comprising a GC content from 40% to 70% and having at least 85% sequence identity to an equal length portion of H. sapiens KCNT1, M. musculus KCNT1, and M. cynomolgus KCNT1.

[0405] In one aspect, the invention features a single-stranded oligonucleotide of 18-22 linked nucleosides in length including a GC content from 40% to 70% and having at least 85% sequence identity to an equal length portion of both H. sapiens KCNT1 and M. musculus KCNT1.

[0406] In another aspect, the invention features a single-stranded oligonucleotide of 18-22 linked nucleosides in length including a GC content from 40% to 70% and having at least 85% sequence identity to an equal length portion of H. sapiens KCNT1 and M. cynomolgus KCNT1.

[0407] In another aspect, the invention features a single-stranded oligonucleotide of 18-22 linked nucleosides in length including a GC content from 40% to 70% and having at least 85% sequence identity to an equal length portion of H. sapiens KCNT1, M. musculus KCNT1, and M. cynomolgus KCNT1.

[0408] In some embodiments, the oligonucleotide includes no more than 2 mismatches to H. sapiens KCNT1.

[0409] In some embodiments, the oligonucleotide includes at least 3 mismatches to any non KCNT1 transcript.

[0410] In some embodiments, the oligonucleotide lacks a GGGG tetrad.

[0411] In another aspect, the invention features a single-stranded oligonucleotide of 18-22 linked nucleosides in length including a region of at least 18 contiguous nucleobases of any one of SEQ ID NOs: 1-3409 (e.g., SEQ ID NOs: 1-116 or 1-3384).

[0412] In some embodiments, the oligonucleotide includes a region having at least 85%, 90%, or 95% sequence identity to at least 18 contiguous nucleobases of any one of SEQ ID NOs: 1-3409 (e.g., SEQ ID NOs: 1-116 or 1-3384).

[0413] In some embodiments, the oligonucleotide includes a gap segment including linked deoxyribonucleosides; a 5′ wing segment including linked nucleosides; and a 3′ wing segment including linked nucleosides. The gap segment may include a region of at least 10 contiguous nucleobases having at least 80% complementarity to an equal length portion of any one of SEQ ID NOs: 1-3409 (e.g., SEQ ID NOs: 1-116 or 1-3384) positioned between the 5′ wing segment and the 3′ wing segment. The 5′ wing segment and the 3′ wing segment may each include at least two linked nucleosides, and at least one nucleoside of each wing segment may include an alternative nucleoside.

[0414] In some embodiments, the region of at least 10 nucleobases has at least 90% (e.g., 91%, 92% 93%, 94%, 95%, 96%, 97%, 98%, 99%, or 100%) complementary to an equal length portion of any one of SEQ ID NOs: 1-3409 (e.g., SEQ ID NOs: 1-116 or 1-3384).

[0415] In some embodiments, the oligonucleotide includes the nucleobase sequence of any one of SEQ ID NOs: 1-3409 (e.g., SEQ ID NOs: 1-116 or 1-3384).

[0416] In some embodiments, the nucleobase sequence of the oligonucleotide consists of any one of SEQ ID NOs: 1-3409 (e.g., SEQ ID NOs: 1-116 or 1-3384).

[0417] In some embodiments, the oligonucleotide includes at least one alternative internucleoside linkage.

[0418] In some embodiments, the at least one alternative internucleoside linkage is a phosphorothioate internucleoside linkage.

[0419] In some embodiments, the at least one alternative internucleoside linkage is a 2′-alkoxy internucleoside linkage.

[0420] In some embodiments, the at least one alternative internucleoside linkage is an alkyl phosphate internucleoside linkage.

[0421] In some embodiments, the oligonucleotide includes at least one alternative nucleobase.

[0422] In some embodiments, the alternative nucleobase is 5′-methylcytosine, pseudouridine, or 5-methoxyuridine.

[0423] In some embodiments, the oligonucleotide includes at least one alternative sugar moiety.

[0424] In some embodiments, the alternative sugar moiety is 2′-OMe or a bicyclic nucleic acid.

[0425] In some embodiments, the oligonucleotide further includes a ligand conjugated to the 5′ end or the 3′ end of the oligonucleotide through a monovalent or branched bivalent or trivalent linker.

[0426] In some embodiments, the oligonucleotide includes a region complementary to at least 17 contiguous nucleotides of a KCNT1 gene.

[0427] In some embodiments, the oligonucleotide includes a region complementary to at least 19 contiguous nucleotides of a KCNT1 gene.

[0428] In some embodiments, the oligonucleotide includes a region of at least 18 contiguous nucleobases of any one of SEQ ID NOs: 1-116.

[0429] In some embodiments, the oligonucleotide includes a region of at least 18 contiguous nucleobases of any one of SEQ ID NOs: 1-17 and 19-50.

[0430] In some embodiments, the oligonucleotide includes a region of at least 18 contiguous nucleobases of SEQ ID NO: 18.

[0431] In some embodiments, the oligonucleotide includes a region of at least 18 contiguous nucleobases of any one of SEQ ID NOs: 51-81, 83-86, and 88-96.

[0432] In some embodiments, the oligonucleotide includes a region of at least 18 contiguous nucleobases of any one of SEQ ID NOs: 82 and 87.

[0433] In some embodiments, the oligonucleotide includes a region of at least 18 contiguous nucleobases of any one of SEQ ID NOs: 97-116.

[0434] In another aspect, the invention features a pharmaceutical composition including the oligonucleotide of any of the above embodiments and a pharmaceutically acceptable carrier or excipient.

[0435] In another aspect, the invention features a composition including the oligonucleotide of any of the above aspects and a lipid nanoparticle, a polyplex nanoparticle, a lipoplex nanoparticle, or a liposome.

[0436] In another aspect, the invention features method of treating, preventing, or delaying the progression of a KCNT1 related disorder in a subject in need thereof, by administering to the subject the oligonucleotide, the pharmaceutical composition, or the composition any of the above aspects in an amount and for a duration sufficient to treat, prevent, or delay the progression of the KCNT1 related disorder.

[0437] In another aspect, the invention features method of treating, preventing, or delaying the progression of a KCNT1 related disorder in a subject by:

[0438] (a) selecting a single-stranded oligonucleotide of 18-22 linked nucleosides in length including a GC content from 40% to 70%, wherein the oligonucleotide:

[0439] (i) has at least 85% sequence identity to an equal length portion of H. sapiens KCNT1 and M. musculus KCNT1;

[0440] (ii) has at least 85% sequence identity to an equal length portion of H. sapiens KCNT1 and M. cynomolgus KCNT1; or

[0441] (iii) has at least 85% sequence identity to an equal length portion of H. sapiens KCNT1, M. musculus KCNT1, and M. cynomolgus KCNT1; and

[0442] (b) administering the oligonucleotide to the subject in an amount and for a duration sufficient to treat, prevent, or delay the progression of the KCNT1 related disorder.

[0443] In some embodiment, the oligonucleotide includes no more than 2 mismatches to H. sapiens KCNT1.

[0444] In some embodiment, the oligonucleotide includes at least 3 mismatches to any non KCNT1 transcript.

[0445] In some embodiment, the oligonucleotide lacks a GGGG tetrad.

[0446] In another aspect, the invention features a method of inhibiting transcription of KCNT1 in a cell, by contacting the cell with the oligonucleotide, the pharmaceutical composition, or the composition of any of the above aspects in an amount and for a duration sufficient to obtain degradation of an mRNA transcript of the KCNT1 gene, wherein the oligonucleotide inhibits expression of the KCNT1 gene in the cell.

[0447] In another aspect, the invention features a method of reducing a level and/or activity of KCNT1 in a cell of a subject having a KCNT1 related disorder, by contacting the cell with the oligonucleotide, the pharmaceutical composition, or the composition of any of the above aspects in an amount and for a duration sufficient to reduce the level and/or activity of KCNT1 in the cell.

[0448] In some embodiments, the subject is a human.

[0449] In some embodiments, the cell is a cell of the central nervous system.

[0450] In some embodiments, the KCNT1 related disorder is selected from the group consisting of epilepsy of infancy with migrating focal seizures, autosomal dominant nocturnal frontal lobe epilepsy, West syndrome, infantile spasms, epileptic encephalopathy, focal epilepsy, Ohtahara syndrome, developmental epileptic encephalopathy, and Lennox Gastaut syndrome.

[0451] In some embodiments, the subject has a gain-of-function mutation in KCNT1.

[0452] In some embodiments, the gain-of-function mutation is selected from the group consisting of V271F, L274I, G288S, F346L, R398Q, R428Q, R474H, F502V, M516V, K629N, I760M, Y796H, E893K, M896I, M896K, P924L, R928C, F932I, A934T, A966T, H257D, R262Q, Q270E, V340M, C377S, P409S, L437F, R474C, A477T, R565H, K629E, G652V, I760F, Q906H, R933G, R950Q, R961H, R1106Q, K1154Q, R474Q, Y1903C, H469L, M896R, K946E, and R950L.

[0453] In some embodiments, the method reduces one or more symptoms of the KCNT1 related disorder.

[0454] In some embodiments, the one or more symptoms of the KCNT1 related disorder is selected from the group consisting of prolonged seizures, frequent seizures, behavioral and developmental delays, movement and balance issues, orthopedic conditions, delayed language and speech issues, growth and nutrition issues, sleeping difficulties, chronic infection, sensory integration disorder, disruption of the autonomic nervous system, and sweating.

### EXAMPLES

### Example 1. Design, Selection, and Testing of Antisense Oligonucleotides

[0455] A bioinformatic analysis was performed to identify regions of human, mouse, and monkey KCNT1 genes with 20 base pair regions having pairwise homology. For example, 20 bp regions having at least 17 bp overlap between human and monkey KCNT1, human and mouse KCNT1, or human, monkey, and mouse KCNT1 were identified. Target sequences that only bind human KCNT1 were also identified. The ASO sequences, positions in the specified human transcript, and number of mismatches are shown in Table 1 of U.S. Provisional Application 62/782,877 filed Dec. 20, 2018, hereby incorporated by reference in its entirety. Furthermore, intronic target sequences in the human KCNT1 gene were identified. These ASO sequences are in Table 2 of U.S. Provisional Application 62/782,877. MM indicates the number of mismatches to either NM_020822.2 or NG_033070.1, for exonic or intronic directed ASOs, respectively.

[0456] For the ASO sequences, homology to non-KCNT1 spliced (secondary) mRNA transcripts was also determined using the NCBI RefSeq R92 (January 2019) and Ensemble R94 (October 2018) databases. Table 3 of U.S. Provisional Application 62/862,328 filed filed Jun. 17, 2019, hereby incorporated by reference in its entirety, lists the number of non-KCNT1 transcripts identified with increasing number of mismatches (MM) from 0MM to 4MM.

[0457] For the ASO sequences, homology to non-KCNT1 non-spliced (primary) pre-mRNA transcripts was also determined using the Ensemble R94 (October 2018) databases. Table 4 of U.S. Provisional Application 62/862,328 filed on Jun. 17, 2019, lists the number of non-KCNT1 transcripts identified with increasing number of mismatches (MM) from 0MM to 4MM.

[0458] For the ASO sequences, the position of reported single nucleotide polymorphisms (SNPs) within the ASO sequence was also determined using the NCBI dbSNP Build 151 (October 2017, downloaded January 2019). Table 5 of U.S. Provisional Application 62/862,328 filed on Jun. 17, 2019, lists the position of each SNP and the associated SNP ID.

[0459] Table 2 shows the SEQ ID NOs of the ASO sequences, the position in the specified human transcript of those ASO sequences, and the number of mismatches (MM). Of note, number of mismatches for SEQ ID NOs: 1-96 and 117-3525 was determined in comparison to NM_020822.2 (SEQ ID NO: 3526). The number of mismatches for SEQ ID NOs: 97-116 is determined in comparison to NG_033070.1.

TABLE 2
Exemplary ASOs, KCNT1 positions, and mismatches

| SEQ | | |
|---|---|---|
| ID NO: | Position | MM |
| 1 | 374 | 0 |
| 2 | 420 | 0 |
| 3 | 497 | 0 |
| 4 | 661 | 0 |
| 5 | 765 | 0 |
| 6 | 837 | 0 |
| 7 | 979 | 0 |
| 8 | 1347 | 0 |
| 9 | 1399 | 0 |
| 10 | 1629 | 0 |
| 11 | 1667 | 0 |
| 12 | 2879 | 0 |
| 13 | 3008 | 0 |
| 14 | 3029 | 0 |
| 15 | 3168 | 0 |
| 16 | 2417 | 0 |
| 17 | 1760 | 0 |
| 18 | 2068 | 0 |
| 19 | 332 | 0 |
| 20 | 391 | 0 |
| 21 | 790 | 0 |
| 22 | 1032 | 0 |
| 23 | 1185 | 0 |
| 24 | 1232 | 0 |
| 25 | 1271 | 0 |
| 26 | 1440 | 0 |
| 27 | 1532 | 0 |
| 28 | 1752 | 0 |
| 29 | 1795 | 0 |
| 30 | 1933 | 0 |
| 31 | 2457 | 0 |
| 32 | 2777 | 0 |
| 33 | 2796 | 0 |
| 34 | 2835 | 0 |
| 35 | 2859 | 0 |
| 36 | 3241 | 0 |
| 37 | 1864 | 0 |
| 38 | 2758 | 0 |
| 39 | 579 | 0 |
| 40 | 702 | 0 |
| 41 | 731 | 0 |
| 42 | 877 | 0 |
| 43 | 903 | 0 |
| 44 | 1879 | 0 |
| 45 | 1954 | 0 |
| 46 | 1983 | 0 |
| 47 | 2322 | 0 |
| 48 | 3087 | 0 |
| 49 | 3520 | 0 |
| 50 | 3654 | 0 |
| 51 | 631 | 0 |
| 52 | 1718 | 0 |
| 53 | 625 | 0 |
| 54 | 1207 | 0 |
| 55 | 1595 | 0 |
| 56 | 1826 | 0 |
| 57 | 2433 | 0 |
| 58 | 539 | 0 |
| 59 | 999 | 0 |
| 60 | 1107 | 0 |
| 61 | 1324 | 0 |
| 62 | 1775 | 0 |
| 63 | 2480 | 0 |
| 64 | 2541 | 0 |
| 65 | 3107 | 0 |
| 66 | 3277 | 0 |
| 67 | 1074 | 0 |
| 68 | 2904 | 0 |
| 69 | 3190 | 0 |
| 70 | 3595 | 0 |
| 71 | 519 | 0 |
| 72 | 964 | 0 |
| 73 | 1476 | 0 |
| 74 | 3210 | 0 |
| 75 | 3908 | 0 |
| 76 | 3974 | 0 |
| 77 | 1601 | 0 |
| 78 | 3847 | 0 |
| 79 | 4360 | 0 |
| 80 | 1449 | 0 |
| 81 | 1988 | 0 |
| 82 | 4429 | 0 |
| 83 | 4499 | 0 |
| 84 | 3876 | 0 |
| 85 | 2442 | 0 |
| 86 | 2026 | 0 |
| 87 | 1012 | 0 |
| 88 | 496 | 0 |
| 89 | 4183 | 0 |
| 90 | 4434 | 0 |
| 91 | 4524 | 0 |
| 92 | 4581 | 0 |
| 93 | 4630 | 0 |
| 94 | 4680 | 0 |
| 95 | 4747 | 0 |
| 96 | 312 | 0 |
| 97 | 3527 | 0 |
| 98 | 8995 | 0 |
| 99 | 671 | 0 |
| 100 | 1379 | 0 |
| 101 | 5358 | 0 |
| 102 | 9844 | 0 |
| 103 | 8176 | 0 |
| 104 | 2942 | 0 |
| 105 | 3523 | 0 |
| 106 | 4677 | 0 |
| 107 | 18797 | 0 |
| 108 | 18207 | 0 |
| 109 | 28183 | 0 |
| 110 | 14791 | 0 |
| 111 | 34987 | 0 |
| 112 | 16368 | 0 |
| 113 | 35212 | 0 |
| 114 | 45235 | 0 |
| 115 | 40062 | 0 |
| 116 | 27111 | 0 |
| 117 | 1 | 0 |
| 118 | 2 | 0 |
| 119 | 3 | 0 |
| 120 | 4 | 0 |
| 121 | 5 | 0 |
| 122 | 6 | 0 |
| 123 | 7 | 0 |
| 124 | 8 | 0 |
| 125 | 9 | 0 |
| 126 | 10 | 0 |
| 127 | 11 | 0 |
| 128 | 12 | 0 |
| 129 | 13 | 0 |
| 130 | 14 | 0 |
| 131 | 15 | 0 |
| 132 | 16 | 0 |
| 133 | 17 | 0 |
| 134 | 18 | 0 |
| 135 | 19 | 0 |
| 136 | 20 | 0 |
| 137 | 21 | 0 |
| 138 | 22 | 0 |
| 139 | 23 | 0 |
| 140 | 24 | 0 |
| 141 | 25 | 0 |
| 142 | 26 | 0 |
| 143 | 27 | 0 |
| 144 | 28 | 0 |
| 145 | 29 | 0 |
| 146 | 30 | 0 |
| 147 | 31 | 0 |
| 148 | 32 | 0 |
| 149 | 33 | 0 |
| 150 | 34 | 0 |
| 151 | 35 | 0 |
| 152 | 36 | 0 |
| 153 | 37 | 0 |
| 154 | 38 | 0 |
| 155 | 39 | 0 |
| 156 | 40 | 0 |
| 157 | 41 | 0 |
| 158 | 42 | 0 |
| 159 | 43 | 0 |
| 160 | 45 | 0 |
| 161 | 46 | 0 |
| 162 | 47 | 0 |
| 163 | 49 | 0 |
| 164 | 50 | 0 |
| 165 | 51 | 0 |
| 166 | 52 | 0 |
| 167 | 56 | 0 |
| 168 | 57 | 0 |
| 169 | 58 | 0 |
| 170 | 59 | 0 |
| 171 | 60 | 0 |
| 172 | 61 | 0 |
| 173 | 62 | 0 |
| 174 | 63 | 0 |
| 175 | 64 | 0 |
| 176 | 65 | 0 |
| 177 | 66 | 0 |
| 178 | 67 | 0 |
| 179 | 68 | 0 |
| 180 | 69 | 0 |
| 181 | 70 | 0 |
| 182 | 71 | 0 |
| 183 | 72 | 0 |
| 184 | 73 | 0 |
| 185 | 74 | 0 |
| 186 | 75 | 0 |
| 187 | 76 | 0 |
| 188 | 80 | 0 |
| 189 | 126 | 0 |
| 190 | 127 | 0 |
| 191 | 128 | 0 |
| 192 | 129 | 0 |
| 193 | 130 | 0 |
| 194 | 131 | 0 |
| 195 | 132 | 0 |
| 196 | 133 | 0 |
| 197 | 134 | 0 |
| 198 | 135 | 0 |
| 199 | 136 | 0 |
| 200 | 137 | 0 |
| 201 | 138 | 0 |
| 202 | 139 | 0 |
| 203 | 140 | 0 |
| 204 | 141 | 0 |
| 205 | 142 | 0 |
| 206 | 143 | 0 |
| 207 | 144 | 0 |
| 208 | 145 | 0 |
| 209 | 146 | 0 |
| 210 | 147 | 0 |
| 211 | 148 | 0 |
| 212 | 149 | 0 |
| 213 | 150 | 0 |
| 214 | 151 | 0 |
| 215 | 152 | 0 |
| 216 | 153 | 0 |
| 217 | 154 | 0 |
| 218 | 155 | 0 |
| 219 | 156 | 0 |
| 220 | 157 | 0 |
| 221 | 158 | 0 |
| 222 | 159 | 0 |
| 223 | 160 | 0 |
| 224 | 161 | 0 |
| 225 | 223 | 0 |
| 226 | 224 | 0 |
| 227 | 225 | 0 |
| 228 | 226 | 0 |
| 229 | 227 | 0 |
| 230 | 228 | 0 |
| 231 | 229 | 0 |
| 232 | 230 | 0 |
| 233 | 231 | 0 |
| 234 | 232 | 0 |
| 235 | 233 | 0 |
| 236 | 234 | 0 |
| 237 | 235 | 0 |
| 238 | 236 | 0 |
| 239 | 237 | 0 |
| 240 | 238 | 0 |
| 241 | 239 | 0 |
| 242 | 240 | 0 |
| 243 | 241 | 0 |
| 244 | 242 | 0 |
| 245 | 243 | 0 |
| 246 | 244 | 0 |
| 247 | 245 | 0 |
| 248 | 246 | 0 |
| 249 | 247 | 0 |
| 250 | 248 | 0 |
| 251 | 249 | 0 |
| 252 | 250 | 0 |
| 253 | 251 | 0 |
| 254 | 252 | 0 |
| 255 | 253 | 0 |
| 256 | 258 | 0 |
| 257 | 259 | 0 |
| 258 | 263 | 0 |
| 259 | 264 | 0 |
| 260 | 265 | 0 |
| 261 | 270 | 0 |
| 262 | 271 | 0 |
| 263 | 272 | 0 |
| 264 | 273 | 0 |
| 265 | 274 | 0 |
| 266 | 275 | 0 |
| 267 | 276 | 0 |
| 268 | 277 | 0 |
| 269 | 278 | 0 |
| 270 | 279 | 0 |
| 271 | 280 | 0 |
| 272 | 281 | 0 |
| 273 | 282 | 0 |
| 274 | 283 | 0 |
| 275 | 285 | 0 |
| 276 | 286 | 0 |
| 277 | 287 | 0 |
| 278 | 288 | 0 |
| 279 | 289 | 0 |
| 280 | 290 | 0 |
| 281 | 291 | 0 |
| 282 | 292 | 0 |
| 283 | 293 | 0 |
| 284 | 294 | 0 |
| 285 | 295 | 0 |
| 286 | 296 | 0 |
| 287 | 297 | 0 |
| 288 | 298 | 0 |
| 289 | 299 | 0 |
| 290 | 300 | 0 |
| 291 | 301 | 0 |
| 292 | 302 | 0 |
| 293 | 303 | 0 |
| 294 | 304 | 0 |
| 295 | 305 | 0 |
| 296 | 306 | 0 |
| 297 | 307 | 0 |
| 298 | 308 | 0 |
| 299 | 309 | 0 |
| 300 | 310 | 0 |
| 301 | 311 | 0 |
| 302 | 313 | 0 |
| 303 | 314 | 0 |
| 304 | 315 | 0 |
| 305 | 316 | 0 |
| 306 | 317 | 0 |
| 307 | 318 | 0 |
| 308 | 319 | 0 |
| 309 | 320 | 0 |
| 310 | 321 | 0 |
| 311 | 322 | 0 |
| 312 | 323 | 0 |
| 313 | 324 | 0 |
| 314 | 325 | 0 |
| 315 | 326 | 0 |
| 316 | 327 | 0 |
| 317 | 328 | 0 |
| 318 | 329 | 0 |
| 319 | 330 | 0 |
| 320 | 331 | 0 |
| 321 | 333 | 0 |
| 322 | 334 | 0 |
| 323 | 335 | 0 |
| 324 | 336 | 0 |
| 325 | 337 | 0 |
| 326 | 338 | 0 |
| 327 | 339 | 0 |
| 328 | 340 | 0 |
| 329 | 341 | 0 |
| 330 | 342 | 0 |
| 331 | 343 | 0 |
| 332 | 344 | 0 |
| 333 | 345 | 0 |
| 334 | 346 | 0 |
| 335 | 347 | 0 |
| 336 | 348 | 0 |
| 337 | 349 | 0 |
| 338 | 350 | 0 |
| 339 | 351 | 0 |
| 340 | 352 | 0 |
| 341 | 353 | 0 |
| 342 | 354 | 0 |
| 343 | 355 | 0 |
| 344 | 356 | 0 |
| 345 | 357 | 0 |
| 346 | 358 | 0 |
| 347 | 359 | 0 |
| 348 | 360 | 0 |
| 349 | 361 | 0 |
| 350 | 362 | 0 |
| 351 | 363 | 0 |
| 352 | 364 | 0 |
| 353 | 365 | 0 |
| 354 | 366 | 0 |
| 355 | 367 | 0 |
| 356 | 368 | 0 |
| 357 | 369 | 0 |
| 358 | 370 | 0 |
| 359 | 371 | 0 |
| 360 | 372 | 0 |
| 361 | 373 | 0 |
| 362 | 375 | 0 |
| 363 | 376 | 0 |
| 364 | 377 | 0 |
| 365 | 379 | 0 |
| 366 | 380 | 0 |
| 367 | 381 | 0 |
| 368 | 388 | 0 |
| 369 | 389 | 0 |
| 370 | 390 | 0 |
| 371 | 392 | 0 |
| 372 | 393 | 0 |
| 373 | 394 | 0 |
| 374 | 395 | 0 |
| 375 | 396 | 0 |
| 376 | 397 | 0 |
| 377 | 398 | 0 |
| 378 | 399 | 0 |
| 379 | 400 | 0 |
| 380 | 401 | 0 |
| 381 | 402 | 0 |
| 382 | 403 | 0 |
| 383 | 404 | 0 |
| 384 | 405 | 0 |
| 385 | 406 | 0 |
| 386 | 407 | 0 |
| 387 | 408 | 0 |
| 388 | 409 | 0 |
| 389 | 410 | 0 |
| 390 | 411 | 0 |
| 391 | 412 | 0 |
| 392 | 413 | 0 |
| 393 | 414 | 0 |
| 394 | 415 | 0 |
| 395 | 416 | 0 |
| 396 | 417 | 0 |
| 397 | 418 | 0 |
| 398 | 419 | 0 |
| 399 | 421 | 0 |
| 400 | 422 | 0 |
| 401 | 423 | 0 |
| 402 | 424 | 0 |
| 403 | 425 | 0 |
| 404 | 426 | 0 |
| 405 | 427 | 0 |
| 406 | 428 | 0 |
| 407 | 429 | 0 |
| 408 | 430 | 0 |
| 409 | 431 | 0 |
| 410 | 432 | 0 |
| 411 | 433 | 0 |
| 412 | 434 | 0 |
| 413 | 435 | 0 |
| 414 | 436 | 0 |
| 415 | 437 | 0 |
| 416 | 438 | 0 |
| 417 | 439 | 0 |
| 418 | 440 | 0 |
| 419 | 441 | 0 |
| 420 | 442 | 0 |
| 421 | 443 | 0 |
| 422 | 444 | 0 |
| 423 | 445 | 0 |
| 424 | 446 | 0 |
| 425 | 447 | 0 |
| 426 | 448 | 0 |
| 427 | 449 | 0 |
| 428 | 450 | 0 |
| 429 | 451 | 0 |
| 430 | 452 | 0 |
| 431 | 453 | 0 |
| 432 | 454 | 0 |
| 433 | 455 | 0 |
| 434 | 456 | 0 |
| 435 | 457 | 0 |
| 436 | 458 | 0 |
| 437 | 459 | 0 |
| 438 | 460 | 0 |
| 439 | 461 | 0 |
| 440 | 462 | 0 |
| 441 | 463 | 0 |
| 442 | 464 | 0 |
| 443 | 465 | 0 |
| 444 | 466 | 0 |
| 445 | 467 | 0 |
| 446 | 468 | 0 |
| 447 | 469 | 0 |
| 448 | 470 | 0 |
| 449 | 471 | 0 |
| 450 | 472 | 0 |
| 451 | 473 | 0 |
| 452 | 474 | 0 |
| 453 | 475 | 0 |
| 454 | 476 | 0 |
| 455 | 477 | 0 |
| 456 | 478 | 0 |
| 457 | 479 | 0 |
| 458 | 480 | 0 |
| 459 | 481 | 0 |
| 460 | 482 | 0 |
| 461 | 483 | 0 |
| 462 | 484 | 0 |
| 463 | 485 | 0 |
| 464 | 487 | 0 |
| 465 | 488 | 0 |
| 466 | 489 | 0 |
| 467 | 490 | 0 |
| 468 | 491 | 0 |
| 469 | 492 | 0 |
| 470 | 493 | 0 |
| 471 | 494 | 0 |
| 472 | 495 | 0 |
| 473 | 498 | 0 |
| 474 | 499 | 0 |
| 475 | 500 | 0 |
| 476 | 501 | 0 |
| 477 | 502 | 0 |
| 478 | 503 | 0 |
| 479 | 504 | 0 |
| 480 | 505 | 0 |
| 481 | 506 | 0 |
| 482 | 507 | 0 |
| 483 | 508 | 0 |
| 484 | 509 | 0 |
| 485 | 510 | 0 |
| 486 | 511 | 0 |
| 487 | 512 | 0 |
| 488 | 513 | 0 |
| 489 | 514 | 0 |
| 490 | 515 | 0 |
| 491 | 516 | 0 |
| 492 | 517 | 0 |
| 493 | 518 | 0 |
| 494 | 520 | 0 |
| 495 | 521 | 0 |
| 496 | 522 | 0 |
| 497 | 523 | 0 |
| 498 | 524 | 0 |
| 499 | 525 | 0 |
| 500 | 526 | 0 |
| 501 | 527 | 0 |
| 502 | 528 | 0 |
| 503 | 529 | 0 |
| 504 | 530 | 0 |
| 505 | 531 | 0 |
| 506 | 532 | 0 |
| 507 | 533 | 0 |
| 508 | 534 | 0 |
| 509 | 535 | 0 |
| 510 | 536 | 0 |
| 511 | 537 | 0 |
| 512 | 538 | 0 |
| 513 | 540 | 0 |
| 514 | 541 | 0 |
| 515 | 542 | 0 |
| 516 | 543 | 0 |
| 517 | 544 | 0 |
| 518 | 545 | 0 |
| 519 | 546 | 0 |
| 520 | 547 | 0 |
| 521 | 548 | 0 |
| 522 | 549 | 0 |
| 523 | 550 | 0 |
| 524 | 551 | 0 |
| 525 | 552 | 0 |
| 526 | 553 | 0 |
| 527 | 554 | 0 |
| 528 | 555 | 0 |
| 529 | 556 | 0 |
| 530 | 557 | 0 |
| 531 | 558 | 0 |
| 532 | 559 | 0 |
| 533 | 560 | 0 |
| 534 | 561 | 0 |
| 535 | 562 | 0 |
| 536 | 563 | 0 |
| 537 | 564 | 0 |
| 538 | 565 | 0 |
| 539 | 566 | 0 |
| 540 | 567 | 0 |
| 541 | 568 | 0 |
| 542 | 569 | 0 |
| 543 | 570 | 0 |
| 544 | 571 | 0 |
| 545 | 572 | 0 |
| 546 | 573 | 0 |
| 547 | 574 | 0 |
| 548 | 575 | 0 |
| 549 | 576 | 0 |
| 550 | 577 | 0 |
| 551 | 578 | 0 |
| 552 | 580 | 0 |
| 553 | 581 | 0 |
| 554 | 582 | 0 |
| 555 | 583 | 0 |
| 556 | 584 | 0 |
| 557 | 585 | 0 |
| 558 | 586 | 0 |
| 559 | 587 | 0 |
| 560 | 588 | 0 |
| 561 | 589 | 0 |
| 562 | 590 | 0 |
| 563 | 591 | 0 |
| 564 | 592 | 0 |
| 565 | 593 | 0 |
| 566 | 594 | 0 |
| 567 | 595 | 0 |
| 568 | 596 | 0 |
| 569 | 597 | 0 |
| 570 | 598 | 0 |
| 571 | 599 | 0 |
| 572 | 600 | 0 |
| 573 | 601 | 0 |
| 574 | 602 | 0 |
| 575 | 603 | 0 |
| 576 | 604 | 0 |
| 577 | 605 | 0 |
| 578 | 606 | 0 |
| 579 | 607 | 0 |
| 580 | 608 | 0 |
| 581 | 609 | 0 |
| 582 | 610 | 0 |
| 583 | 611 | 0 |
| 584 | 612 | 0 |
| 585 | 613 | 0 |
| 586 | 614 | 0 |
| 587 | 615 | 0 |
| 588 | 616 | 0 |
| 589 | 617 | 0 |
| 590 | 618 | 0 |
| 591 | 619 | 0 |
| 592 | 620 | 0 |
| 593 | 621 | 0 |
| 594 | 622 | 0 |
| 595 | 623 | 0 |
| 596 | 624 | 0 |
| 597 | 626 | 0 |
| 598 | 627 | 0 |
| 599 | 628 | 0 |
| 600 | 629 | 0 |
| 601 | 630 | 0 |
| 602 | 632 | 0 |
| 603 | 633 | 0 |
| 604 | 634 | 0 |
| 605 | 635 | 0 |
| 606 | 636 | 0 |
| 607 | 637 | 0 |
| 608 | 638 | 0 |
| 609 | 639 | 0 |
| 610 | 640 | 0 |
| 611 | 641 | 0 |
| 612 | 642 | 0 |
| 613 | 643 | 0 |
| 614 | 644 | 0 |
| 615 | 645 | 0 |
| 616 | 646 | 0 |
| 617 | 647 | 0 |
| 618 | 648 | 0 |
| 619 | 649 | 0 |
| 620 | 650 | 0 |
| 621 | 651 | 0 |
| 622 | 652 | 0 |
| 623 | 653 | 0 |
| 624 | 654 | 0 |
| 625 | 655 | 0 |
| 626 | 656 | 0 |
| 627 | 657 | 0 |
| 628 | 658 | 0 |
| 629 | 659 | 0 |
| 630 | 660 | 0 |
| 631 | 662 | 0 |
| 632 | 663 | 0 |
| 633 | 664 | 0 |
| 634 | 665 | 0 |
| 635 | 666 | 0 |
| 636 | 667 | 0 |
| 637 | 668 | 0 |
| 638 | 669 | 0 |
| 639 | 670 | 0 |
| 640 | 671 | 0 |
| 641 | 672 | 0 |
| 642 | 673 | 0 |
| 643 | 674 | 0 |
| 644 | 675 | 0 |
| 645 | 676 | 0 |
| 646 | 677 | 0 |
| 647 | 678 | 0 |
| 648 | 679 | 0 |
| 649 | 680 | 0 |
| 650 | 681 | 0 |
| 651 | 682 | 0 |
| 652 | 683 | 0 |
| 653 | 684 | 0 |
| 654 | 685 | 0 |
| 655 | 686 | 0 |
| 656 | 687 | 0 |
| 657 | 688 | 0 |
| 658 | 689 | 0 |
| 659 | 690 | 0 |
| 660 | 691 | 0 |
| 661 | 692 | 0 |
| 662 | 693 | 0 |
| 663 | 694 | 0 |
| 664 | 695 | 0 |
| 665 | 696 | 0 |
| 666 | 697 | 0 |
| 667 | 698 | 0 |
| 668 | 699 | 0 |
| 669 | 700 | 0 |
| 670 | 701 | 0 |
| 671 | 703 | 0 |
| 672 | 704 | 0 |
| 673 | 705 | 0 |
| 674 | 706 | 0 |
| 675 | 707 | 0 |
| 676 | 708 | 0 |
| 677 | 709 | 0 |
| 678 | 710 | 0 |
| 679 | 711 | 0 |
| 680 | 712 | 0 |
| 681 | 713 | 0 |
| 682 | 714 | 0 |
| 683 | 715 | 0 |
| 684 | 716 | 0 |
| 685 | 717 | 0 |
| 686 | 718 | 0 |
| 687 | 719 | 0 |
| 688 | 720 | 0 |
| 689 | 721 | 0 |
| 690 | 722 | 0 |
| 691 | 723 | 0 |
| 692 | 724 | 0 |
| 693 | 725 | 0 |
| 694 | 726 | 0 |
| 695 | 727 | 0 |
| 696 | 728 | 0 |
| 697 | 729 | 0 |
| 698 | 730 | 0 |
| 699 | 732 | 0 |
| 700 | 733 | 0 |
| 701 | 734 | 0 |
| 702 | 735 | 0 |
| 703 | 736 | 0 |
| 704 | 737 | 0 |
| 705 | 738 | 0 |
| 706 | 739 | 0 |
| 707 | 740 | 0 |
| 708 | 741 | 0 |
| 709 | 742 | 0 |
| 710 | 743 | 0 |
| 711 | 744 | 0 |
| 712 | 745 | 0 |
| 713 | 746 | 0 |
| 714 | 747 | 0 |
| 715 | 748 | 0 |
| 716 | 749 | 0 |
| 717 | 750 | 0 |
| 718 | 751 | 0 |
| 719 | 752 | 0 |
| 720 | 753 | 0 |
| 721 | 754 | 0 |
| 722 | 756 | 0 |
| 723 | 758 | 0 |
| 724 | 759 | 0 |
| 725 | 760 | 0 |
| 726 | 761 | 0 |
| 727 | 762 | 0 |
| 728 | 763 | 0 |
| 729 | 764 | 0 |
| 730 | 783 | 0 |
| 731 | 784 | 0 |
| 732 | 785 | 0 |
| 733 | 786 | 0 |
| 734 | 787 | 0 |
| 735 | 788 | 0 |
| 736 | 789 | 0 |
| 737 | 791 | 0 |
| 738 | 792 | 0 |
| 739 | 793 | 0 |
| 740 | 794 | 0 |
| 741 | 795 | 0 |
| 742 | 796 | 0 |
| 743 | 797 | 0 |
| 744 | 798 | 0 |
| 745 | 799 | 0 |
| 746 | 800 | 0 |
| 747 | 801 | 0 |
| 748 | 802 | 0 |
| 749 | 803 | 0 |
| 750 | 804 | 0 |
| 751 | 805 | 0 |
| 752 | 806 | 0 |
| 753 | 807 | 0 |
| 754 | 808 | 0 |
| 755 | 809 | 0 |
| 756 | 810 | 0 |
| 757 | 811 | 0 |
| 758 | 812 | 0 |
| 759 | 813 | 0 |
| 760 | 814 | 0 |
| 761 | 815 | 0 |
| 762 | 816 | 0 |
| 763 | 817 | 0 |
| 764 | 818 | 0 |
| 765 | 826 | 0 |
| 766 | 827 | 0 |
| 767 | 828 | 0 |
| 768 | 829 | 0 |
| 769 | 830 | 0 |
| 770 | 831 | 0 |
| 771 | 832 | 0 |
| 772 | 833 | 0 |
| 773 | 834 | 0 |
| 774 | 835 | 0 |
| 775 | 836 | 0 |
| 776 | 838 | 0 |
| 777 | 839 | 0 |
| 778 | 840 | 0 |
| 779 | 841 | 0 |
| 780 | 842 | 0 |
| 781 | 843 | 0 |
| 782 | 844 | 0 |
| 783 | 845 | 0 |
| 784 | 846 | 0 |
| 785 | 847 | 0 |
| 786 | 848 | 0 |
| 787 | 849 | 0 |
| 788 | 850 | 0 |
| 789 | 851 | 0 |
| 790 | 852 | 0 |
| 791 | 853 | 0 |
| 792 | 854 | 0 |
| 793 | 855 | 0 |
| 794 | 856 | 0 |
| 795 | 857 | 0 |
| 796 | 858 | 0 |
| 797 | 859 | 0 |
| 798 | 860 | 0 |
| 799 | 861 | 0 |
| 800 | 862 | 0 |
| 801 | 863 | 0 |
| 802 | 864 | 0 |
| 803 | 865 | 0 |
| 804 | 866 | 0 |
| 805 | 867 | 0 |
| 806 | 868 | 0 |
| 807 | 869 | 0 |
| 808 | 870 | 0 |
| 809 | 871 | 0 |
| 810 | 872 | 0 |
| 811 | 873 | 0 |
| 812 | 874 | 0 |
| 813 | 875 | 0 |
| 814 | 876 | 0 |
| 815 | 878 | 0 |
| 816 | 879 | 0 |
| 817 | 880 | 0 |
| 818 | 881 | 0 |
| 819 | 882 | 0 |
| 820 | 883 | 0 |
| 821 | 884 | 0 |
| 822 | 885 | 0 |
| 823 | 886 | 0 |
| 824 | 887 | 0 |
| 825 | 888 | 0 |
| 826 | 889 | 0 |
| 827 | 890 | 0 |
| 828 | 891 | 0 |
| 829 | 892 | 0 |
| 830 | 893 | 0 |
| 831 | 894 | 0 |
| 832 | 895 | 0 |
| 833 | 896 | 0 |
| 834 | 897 | 0 |
| 835 | 898 | 0 |
| 836 | 899 | 0 |
| 837 | 900 | 0 |
| 838 | 901 | 0 |
| 839 | 902 | 0 |
| 840 | 904 | 0 |
| 841 | 905 | 0 |
| 842 | 906 | 0 |
| 843 | 907 | 0 |
| 844 | 908 | 0 |
| 845 | 909 | 0 |
| 846 | 910 | 0 |
| 847 | 911 | 0 |
| 848 | 912 | 0 |
| 849 | 913 | 0 |
| 850 | 914 | 0 |
| 851 | 915 | 0 |
| 852 | 916 | 0 |
| 853 | 917 | 0 |
| 854 | 918 | 0 |
| 855 | 919 | 0 |
| 856 | 920 | 0 |
| 857 | 921 | 0 |
| 858 | 922 | 0 |
| 859 | 923 | 0 |
| 860 | 924 | 0 |
| 861 | 925 | 0 |
| 862 | 926 | 0 |
| 863 | 927 | 0 |
| 864 | 928 | 0 |
| 865 | 929 | 0 |
| 866 | 930 | 0 |
| 867 | 931 | 0 |
| 868 | 932 | 0 |
| 869 | 933 | 0 |
| 870 | 934 | 0 |
| 871 | 935 | 0 |
| 872 | 936 | 0 |
| 873 | 937 | 0 |
| 874 | 938 | 0 |
| 875 | 939 | 0 |
| 876 | 940 | 0 |
| 877 | 948 | 0 |
| 878 | 949 | 0 |
| 879 | 951 | 0 |
| 880 | 952 | 0 |
| 881 | 953 | 0 |
| 882 | 954 | 0 |
| 883 | 955 | 0 |
| 884 | 956 | 0 |
| 885 | 957 | 0 |
| 886 | 958 | 0 |
| 887 | 959 | 0 |
| 888 | 960 | 0 |
| 889 | 961 | 0 |
| 890 | 962 | 0 |
| 891 | 963 | 0 |
| 892 | 965 | 0 |
| 893 | 966 | 0 |
| 894 | 967 | 0 |
| 895 | 968 | 0 |
| 896 | 969 | 0 |
| 897 | 970 | 0 |
| 898 | 971 | 0 |
| 899 | 972 | 0 |
| 900 | 973 | 0 |
| 901 | 974 | 0 |
| 902 | 975 | 0 |
| 903 | 976 | 0 |
| 904 | 977 | 0 |
| 905 | 978 | 0 |
| 906 | 980 | 0 |
| 907 | 981 | 0 |
| 908 | 982 | 0 |
| 909 | 983 | 0 |
| 910 | 984 | 0 |
| 911 | 985 | 0 |
| 912 | 986 | 0 |
| 913 | 987 | 0 |
| 914 | 988 | 0 |
| 915 | 989 | 0 |
| 916 | 990 | 0 |
| 917 | 991 | 0 |
| 918 | 992 | 0 |
| 919 | 993 | 0 |
| 920 | 994 | 0 |
| 921 | 995 | 0 |
| 922 | 996 | 0 |
| 923 | 997 | 0 |
| 924 | 998 | 0 |
| 925 | 1000 | 0 |
| 926 | 1001 | 0 |
| 927 | 1002 | 0 |
| 928 | 1003 | 0 |
| 929 | 1004 | 0 |
| 930 | 1005 | 0 |
| 931 | 1006 | 0 |
| 932 | 1007 | 0 |
| 933 | 1008 | 0 |
| 934 | 1009 | 0 |
| 935 | 1010 | 0 |
| 936 | 1011 | 0 |
| 937 | 1013 | 0 |
| 938 | 1014 | 0 |
| 939 | 1015 | 0 |
| 940 | 1016 | 0 |
| 941 | 1028 | 0 |
| 942 | 1029 | 0 |
| 943 | 1030 | 0 |
| 944 | 1031 | 0 |
| 945 | 1033 | 0 |
| 946 | 1034 | 0 |
| 947 | 1035 | 0 |
| 948 | 1036 | 0 |
| 949 | 1037 | 0 |
| 950 | 1038 | 0 |
| 951 | 1039 | 0 |
| 952 | 1040 | 0 |
| 953 | 1041 | 0 |
| 954 | 1042 | 0 |
| 955 | 1056 | 0 |
| 956 | 1057 | 0 |
| 957 | 1058 | 0 |
| 958 | 1059 | 0 |
| 959 | 1060 | 0 |
| 960 | 1061 | 0 |
| 961 | 1062 | 0 |
| 962 | 1063 | 0 |
| 963 | 1064 | 0 |
| 964 | 1065 | 0 |
| 965 | 1066 | 0 |
| 966 | 1067 | 0 |
| 967 | 1068 | 0 |
| 968 | 1069 | 0 |
| 969 | 1070 | 0 |
| 970 | 1071 | 0 |
| 971 | 1072 | 0 |
| 972 | 1073 | 0 |
| 973 | 1075 | 0 |
| 974 | 1076 | 0 |
| 975 | 1077 | 0 |
| 976 | 1078 | 0 |
| 977 | 1079 | 0 |
| 978 | 1080 | 0 |
| 979 | 1081 | 0 |
| 980 | 1082 | 0 |
| 981 | 1083 | 0 |
| 982 | 1084 | 0 |
| 983 | 1085 | 0 |
| 984 | 1086 | 0 |
| 985 | 1087 | 0 |
| 986 | 1088 | 0 |
| 987 | 1089 | 0 |
| 988 | 1090 | 0 |
| 989 | 1091 | 0 |
| 990 | 1092 | 0 |
| 991 | 1093 | 0 |
| 992 | 1094 | 0 |
| 993 | 1095 | 0 |
| 994 | 1096 | 0 |
| 995 | 1097 | 0 |
| 996 | 1098 | 0 |
| 997 | 1099 | 0 |
| 998 | 1100 | 0 |
| 999 | 1101 | 0 |
| 1000 | 1102 | 0 |
| 1001 | 1103 | 0 |
| 1002 | 1104 | 0 |
| 1003 | 1105 | 0 |
| 1004 | 1106 | 0 |
| 1005 | 1108 | 0 |
| 1006 | 1109 | 0 |
| 1007 | 1110 | 0 |
| 1008 | 1111 | 0 |
| 1009 | 1112 | 0 |
| 1010 | 1113 | 0 |
| 1011 | 1114 | 0 |
| 1012 | 1115 | 0 |
| 1013 | 1116 | 0 |
| 1014 | 1117 | 0 |
| 1015 | 1118 | 0 |
| 1016 | 1119 | 0 |
| 1017 | 1120 | 0 |
| 1018 | 1121 | 0 |
| 1019 | 1122 | 0 |
| 1020 | 1123 | 0 |
| 1021 | 1124 | 0 |
| 1022 | 1125 | 0 |
| 1023 | 1126 | 0 |
| 1024 | 1127 | 0 |
| 1025 | 1128 | 0 |
| 1026 | 1129 | 0 |
| 1027 | 1130 | 0 |
| 1028 | 1131 | 0 |
| 1029 | 1132 | 0 |
| 1030 | 1133 | 0 |
| 1031 | 1134 | 0 |
| 1032 | 1135 | 0 |
| 1033 | 1136 | 0 |
| 1034 | 1137 | 0 |
| 1035 | 1138 | 0 |
| 1036 | 1139 | 0 |
| 1037 | 1140 | 0 |
| 1038 | 1141 | 0 |
| 1039 | 1142 | 0 |
| 1040 | 1143 | 0 |
| 1041 | 1144 | 0 |
| 1042 | 1145 | 0 |
| 1043 | 1146 | 0 |
| 1044 | 1147 | 0 |
| 1045 | 1148 | 0 |
| 1046 | 1149 | 0 |
| 1047 | 1150 | 0 |
| 1048 | 1151 | 0 |
| 1049 | 1152 | 0 |
| 1050 | 1153 | 0 |
| 1051 | 1154 | 0 |
| 1052 | 1155 | 0 |
| 1053 | 1156 | 0 |
| 1054 | 1157 | 0 |
| 1055 | 1158 | 0 |
| 1056 | 1159 | 0 |
| 1057 | 1160 | 0 |
| 1058 | 1161 | 0 |
| 1059 | 1162 | 0 |
| 1060 | 1163 | 0 |
| 1061 | 1164 | 0 |
| 1062 | 1167 | 0 |
| 1063 | 1168 | 0 |
| 1064 | 1169 | 0 |
| 1065 | 1170 | 0 |
| 1066 | 1171 | 0 |
| 1067 | 1172 | 0 |
| 1068 | 1173 | 0 |
| 1069 | 1174 | 0 |
| 1070 | 1175 | 0 |
| 1071 | 1176 | 0 |
| 1072 | 1177 | 0 |
| 1073 | 1178 | 0 |
| 1074 | 1179 | 0 |
| 1075 | 1180 | 0 |
| 1076 | 1181 | 0 |
| 1077 | 1182 | 0 |
| 1078 | 1183 | 0 |
| 1079 | 1184 | 0 |
| 1080 | 1186 | 0 |
| 1081 | 1187 | 0 |
| 1082 | 1188 | 0 |
| 1083 | 1189 | 0 |
| 1084 | 1190 | 0 |
| 1085 | 1191 | 0 |
| 1086 | 1192 | 0 |
| 1087 | 1193 | 0 |
| 1088 | 1194 | 0 |
| 1089 | 1195 | 0 |
| 1090 | 1196 | 0 |
| 1091 | 1197 | 0 |
| 1092 | 1198 | 0 |
| 1093 | 1199 | 0 |
| 1094 | 1200 | 0 |
| 1095 | 1201 | 0 |
| 1096 | 1202 | 0 |
| 1097 | 1203 | 0 |
| 1098 | 1204 | 0 |
| 1099 | 1205 | 0 |
| 1100 | 1206 | 0 |
| 1101 | 1208 | 0 |
| 1102 | 1209 | 0 |
| 1103 | 1210 | 0 |
| 1104 | 1211 | 0 |
| 1105 | 1212 | 0 |
| 1106 | 1213 | 0 |
| 1107 | 1214 | 0 |
| 1108 | 1215 | 0 |
| 1109 | 1216 | 0 |
| 1110 | 1217 | 0 |
| 1111 | 1218 | 0 |
| 1112 | 1219 | 0 |
| 1113 | 1220 | 0 |
| 1114 | 1221 | 0 |
| 1115 | 1222 | 0 |
| 1116 | 1223 | 0 |
| 1117 | 1224 | 0 |
| 1118 | 1225 | 0 |
| 1119 | 1226 | 0 |
| 1120 | 1227 | 0 |
| 1121 | 1228 | 0 |
| 1122 | 1229 | 0 |
| 1123 | 1230 | 0 |
| 1124 | 1231 | 0 |
| 1125 | 1233 | 0 |
| 1126 | 1234 | 0 |
| 1127 | 1235 | 0 |
| 1128 | 1236 | 0 |
| 1129 | 1237 | 0 |
| 1130 | 1238 | 0 |
| 1131 | 1239 | 0 |
| 1132 | 1240 | 0 |
| 1133 | 1241 | 0 |
| 1134 | 1242 | 0 |
| 1135 | 1243 | 0 |
| 1136 | 1244 | 0 |
| 1137 | 1245 | 0 |
| 1138 | 1264 | 0 |
| 1139 | 1265 | 0 |
| 1140 | 1266 | 0 |
| 1141 | 1267 | 0 |
| 1142 | 1268 | 0 |
| 1143 | 1269 | 0 |
| 1144 | 1270 | 0 |
| 1145 | 1272 | 0 |
| 1146 | 1273 | 0 |
| 1147 | 1274 | 0 |
| 1148 | 1275 | 0 |
| 1149 | 1276 | 0 |
| 1150 | 1277 | 0 |
| 1151 | 1278 | 0 |
| 1152 | 1279 | 0 |
| 1153 | 1280 | 0 |
| 1154 | 1281 | 0 |
| 1155 | 1299 | 0 |
| 1156 | 1300 | 0 |
| 1157 | 1301 | 0 |
| 1158 | 1302 | 0 |
| 1159 | 1303 | 0 |
| 1160 | 1304 | 0 |
| 1161 | 1305 | 0 |
| 1162 | 1306 | 0 |
| 1163 | 1307 | 0 |
| 1164 | 1308 | 0 |
| 1165 | 1309 | 0 |
| 1166 | 1310 | 0 |
| 1167 | 1311 | 0 |
| 1168 | 1312 | 0 |
| 1169 | 1313 | 0 |
| 1170 | 1314 | 0 |
| 1171 | 1315 | 0 |
| 1172 | 1316 | 0 |
| 1173 | 1317 | 0 |
| 1174 | 1318 | 0 |
| 1175 | 1319 | 0 |
| 1176 | 1320 | 0 |
| 1177 | 1321 | 0 |
| 1178 | 1322 | 0 |
| 1179 | 1323 | 0 |
| 1180 | 1325 | 0 |
| 1181 | 1326 | 0 |
| 1182 | 1327 | 0 |
| 1183 | 1328 | 0 |
| 1184 | 1329 | 0 |
| 1185 | 1330 | 0 |
| 1186 | 1331 | 0 |
| 1187 | 1332 | 0 |
| 1188 | 1333 | 0 |
| 1189 | 1334 | 0 |
| 1190 | 1335 | 0 |
| 1191 | 1336 | 0 |
| 1192 | 1337 | 0 |
| 1193 | 1338 | 0 |
| 1194 | 1339 | 0 |
| 1195 | 1340 | 0 |
| 1196 | 1341 | 0 |
| 1197 | 1342 | 0 |
| 1198 | 1343 | 0 |
| 1199 | 1344 | 0 |
| 1200 | 1345 | 0 |
| 1201 | 1346 | 0 |
| 1202 | 1348 | 0 |
| 1203 | 1349 | 0 |
| 1204 | 1350 | 0 |
| 1205 | 1351 | 0 |
| 1206 | 1352 | 0 |
| 1207 | 1353 | 0 |
| 1208 | 1354 | 0 |
| 1209 | 1355 | 0 |
| 1210 | 1356 | 0 |
| 1211 | 1357 | 0 |
| 1212 | 1358 | 0 |
| 1213 | 1359 | 0 |
| 1214 | 1360 | 0 |
| 1215 | 1361 | 0 |
| 1216 | 1362 | 0 |
| 1217 | 1363 | 0 |
| 1218 | 1364 | 0 |
| 1219 | 1365 | 0 |
| 1220 | 1366 | 0 |
| 1221 | 1367 | 0 |
| 1222 | 1368 | 0 |
| 1223 | 1369 | 0 |
| 1224 | 1370 | 0 |
| 1225 | 1371 | 0 |
| 1226 | 1372 | 0 |
| 1227 | 1373 | 0 |
| 1228 | 1374 | 0 |
| 1229 | 1375 | 0 |
| 1230 | 1376 | 0 |
| 1231 | 1377 | 0 |
| 1232 | 1378 | 0 |
| 1233 | 1379 | 0 |
| 1234 | 1380 | 0 |
| 1235 | 1381 | 0 |
| 1236 | 1382 | 0 |
| 1237 | 1383 | 0 |
| 1238 | 1384 | 0 |
| 1239 | 1385 | 0 |
| 1240 | 1386 | 0 |
| 1241 | 1387 | 0 |
| 1242 | 1388 | 0 |
| 1243 | 1389 | 0 |
| 1244 | 1390 | 0 |
| 1245 | 1391 | 0 |
| 1246 | 1392 | 0 |
| 1247 | 1393 | 0 |
| 1248 | 1394 | 0 |
| 1249 | 1395 | 0 |
| 1250 | 1396 | 0 |
| 1251 | 1397 | 0 |
| 1252 | 1398 | 0 |
| 1253 | 1400 | 0 |
| 1254 | 1401 | 0 |
| 1255 | 1402 | 0 |
| 1256 | 1403 | 0 |
| 1257 | 1404 | 0 |
| 1258 | 1405 | 0 |
| 1259 | 1406 | 0 |
| 1260 | 1407 | 0 |
| 1261 | 1408 | 0 |
| 1262 | 1409 | 0 |
| 1263 | 1410 | 0 |
| 1264 | 1411 | 0 |
| 1265 | 1412 | 0 |
| 1266 | 1413 | 0 |
| 1267 | 1414 | 0 |
| 1268 | 1415 | 0 |
| 1269 | 1416 | 0 |
| 1270 | 1417 | 0 |
| 1271 | 1418 | 0 |
| 1272 | 1419 | 0 |
| 1273 | 1420 | 0 |
| 1274 | 1421 | 0 |
| 1275 | 1422 | 0 |
| 1276 | 1423 | 0 |
| 1277 | 1424 | 0 |
| 1278 | 1425 | 0 |
| 1279 | 1426 | 0 |
| 1280 | 1427 | 0 |
| 1281 | 1428 | 0 |
| 1282 | 1429 | 0 |
| 1283 | 1430 | 0 |
| 1284 | 1431 | 0 |
| 1285 | 1432 | 0 |
| 1286 | 1433 | 0 |
| 1287 | 1434 | 0 |
| 1288 | 1435 | 0 |
| 1289 | 1436 | 0 |
| 1290 | 1437 | 0 |
| 1291 | 1438 | 0 |
| 1292 | 1439 | 0 |
| 1293 | 1441 | 0 |
| 1294 | 1442 | 0 |
| 1295 | 1443 | 0 |
| 1296 | 1444 | 0 |
| 1297 | 1445 | 0 |
| 1298 | 1446 | 0 |
| 1299 | 1447 | 0 |
| 1300 | 1448 | 0 |
| 1301 | 1450 | 0 |
| 1302 | 1451 | 0 |
| 1303 | 1452 | 0 |
| 1304 | 1453 | 0 |
| 1305 | 1454 | 0 |
| 1306 | 1455 | 0 |
| 1307 | 1456 | 0 |
| 1308 | 1457 | 0 |
| 1309 | 1458 | 0 |
| 1310 | 1459 | 0 |
| 1311 | 1460 | 0 |
| 1312 | 1461 | 0 |
| 1313 | 1462 | 0 |
| 1314 | 1463 | 0 |
| 1315 | 1464 | 0 |
| 1316 | 1465 | 0 |
| 1317 | 1466 | 0 |
| 1318 | 1467 | 0 |
| 1319 | 1468 | 0 |
| 1320 | 1469 | 0 |
| 1321 | 1470 | 0 |
| 1322 | 1471 | 0 |
| 1323 | 1472 | 0 |
| 1324 | 1473 | 0 |
| 1325 | 1474 | 0 |
| 1326 | 1475 | 0 |
| 1327 | 1477 | 0 |
| 1328 | 1478 | 0 |
| 1329 | 1494 | 0 |
| 1330 | 1495 | 0 |
| 1331 | 1496 | 0 |
| 1332 | 1497 | 0 |
| 1333 | 1498 | 0 |
| 1334 | 1499 | 0 |
| 1335 | 1500 | 0 |
| 1336 | 1501 | 0 |
| 1337 | 1502 | 0 |
| 1338 | 1531 | 0 |
| 1339 | 1533 | 0 |
| 1340 | 1534 | 0 |
| 1341 | 1535 | 0 |
| 1342 | 1536 | 0 |
| 1343 | 1537 | 0 |
| 1344 | 1538 | 0 |
| 1345 | 1539 | 0 |
| 1346 | 1540 | 0 |
| 1347 | 1541 | 0 |
| 1348 | 1542 | 0 |
| 1349 | 1543 | 0 |
| 1350 | 1544 | 0 |
| 1351 | 1545 | 0 |
| 1352 | 1546 | 0 |
| 1353 | 1547 | 0 |
| 1354 | 1548 | 0 |
| 1355 | 1550 | 0 |
| 1356 | 1552 | 0 |
| 1357 | 1553 | 0 |
| 1358 | 1554 | 0 |
| 1359 | 1555 | 0 |
| 1360 | 1556 | 0 |
| 1361 | 1557 | 0 |
| 1362 | 1558 | 0 |
| 1363 | 1559 | 0 |
| 1364 | 1560 | 0 |
| 1365 | 1561 | 0 |
| 1366 | 1562 | 0 |
| 1367 | 1563 | 0 |
| 1368 | 1564 | 0 |
| 1369 | 1565 | 0 |
| 1370 | 1566 | 0 |
| 1371 | 1567 | 0 |
| 1372 | 1568 | 0 |
| 1373 | 1569 | 0 |
| 1374 | 1570 | 0 |
| 1375 | 1571 | 0 |
| 1376 | 1572 | 0 |
| 1377 | 1573 | 0 |
| 1378 | 1587 | 0 |
| 1379 | 1588 | 0 |
| 1380 | 1589 | 0 |
| 1381 | 1590 | 0 |
| 1382 | 1591 | 0 |
| 1383 | 1592 | 0 |
| 1384 | 1593 | 0 |
| 1385 | 1594 | 0 |
| 1386 | 1596 | 0 |
| 1387 | 1597 | 0 |
| 1388 | 1598 | 0 |
| 1389 | 1599 | 0 |
| 1390 | 1600 | 0 |
| 1391 | 1602 | 0 |
| 1392 | 1603 | 0 |
| 1393 | 1604 | 0 |
| 1394 | 1605 | 0 |
| 1395 | 1606 | 0 |
| 1396 | 1607 | 0 |
| 1397 | 1608 | 0 |
| 1398 | 1609 | 0 |
| 1399 | 1610 | 0 |
| 1400 | 1611 | 0 |
| 1401 | 1612 | 0 |
| 1402 | 1613 | 0 |
| 1403 | 1614 | 0 |
| 1404 | 1615 | 0 |
| 1405 | 1616 | 0 |
| 1406 | 1617 | 0 |
| 1407 | 1618 | 0 |
| 1408 | 1619 | 0 |
| 1409 | 1620 | 0 |
| 1410 | 1621 | 0 |
| 1411 | 1622 | 0 |
| 1412 | 1623 | 0 |
| 1413 | 1624 | 0 |
| 1414 | 1625 | 0 |
| 1415 | 1626 | 0 |
| 1416 | 1627 | 0 |
| 1417 | 1628 | 0 |
| 1418 | 1630 | 0 |
| 1419 | 1631 | 0 |
| 1420 | 1632 | 0 |
| 1421 | 1633 | 0 |
| 1422 | 1634 | 0 |
| 1423 | 1635 | 0 |
| 1424 | 1636 | 0 |
| 1425 | 1637 | 0 |
| 1426 | 1638 | 0 |
| 1427 | 1639 | 0 |
| 1428 | 1641 | 0 |
| 1429 | 1643 | 0 |
| 1430 | 1644 | 0 |
| 1431 | 1645 | 0 |
| 1432 | 1646 | 0 |
| 1433 | 1647 | 0 |
| 1434 | 1648 | 0 |
| 1435 | 1649 | 0 |
| 1436 | 1650 | 0 |
| 1437 | 1651 | 0 |
| 1438 | 1652 | 0 |
| 1439 | 1653 | 0 |
| 1440 | 1654 | 0 |
| 1441 | 1655 | 0 |
| 1442 | 1656 | 0 |
| 1443 | 1657 | 0 |
| 1444 | 1658 | 0 |
| 1445 | 1659 | 0 |
| 1446 | 1660 | 0 |
| 1447 | 1661 | 0 |
| 1448 | 1662 | 0 |
| 1449 | 1663 | 0 |
| 1450 | 1664 | 0 |
| 1451 | 1665 | 0 |
| 1452 | 1666 | 0 |
| 1453 | 1668 | 0 |
| 1454 | 1669 | 0 |
| 1455 | 1670 | 0 |
| 1456 | 1686 | 0 |
| 1457 | 1687 | 0 |
| 1458 | 1688 | 0 |
| 1459 | 1689 | 0 |
| 1460 | 1690 | 0 |
| 1461 | 1691 | 0 |
| 1462 | 1692 | 0 |
| 1463 | 1693 | 0 |
| 1464 | 1694 | 0 |
| 1465 | 1695 | 0 |
| 1466 | 1709 | 0 |
| 1467 | 1710 | 0 |
| 1468 | 1711 | 0 |
| 1469 | 1712 | 0 |
| 1470 | 1713 | 0 |
| 1471 | 1714 | 0 |
| 1472 | 1715 | 0 |
| 1473 | 1716 | 0 |
| 1474 | 1717 | 0 |
| 1475 | 1719 | 0 |
| 1476 | 1720 | 0 |
| 1477 | 1721 | 0 |
| 1478 | 1722 | 0 |
| 1479 | 1723 | 0 |
| 1480 | 1724 | 0 |
| 1481 | 1725 | 0 |
| 1482 | 1726 | 0 |
| 1483 | 1727 | 0 |
| 1484 | 1728 | 0 |
| 1485 | 1729 | 0 |
| 1486 | 1730 | 0 |
| 1487 | 1731 | 0 |
| 1488 | 1732 | 0 |
| 1489 | 1733 | 0 |
| 1490 | 1734 | 0 |
| 1491 | 1735 | 0 |
| 1492 | 1736 | 0 |
| 1493 | 1737 | 0 |
| 1494 | 1738 | 0 |
| 1495 | 1739 | 0 |
| 1496 | 1740 | 0 |
| 1497 | 1741 | 0 |
| 1498 | 1742 | 0 |
| 1499 | 1743 | 0 |
| 1500 | 1744 | 0 |
| 1501 | 1745 | 0 |
| 1502 | 1746 | 0 |
| 1503 | 1747 | 0 |
| 1504 | 1748 | 0 |
| 1505 | 1749 | 0 |
| 1506 | 1750 | 0 |
| 1507 | 1751 | 0 |
| 1508 | 1753 | 0 |
| 1509 | 1754 | 0 |
| 1510 | 1755 | 0 |
| 1511 | 1756 | 0 |
| 1512 | 1757 | 0 |
| 1513 | 1758 | 0 |
| 1514 | 1759 | 0 |
| 1515 | 1761 | 0 |
| 1516 | 1762 | 0 |
| 1517 | 1763 | 0 |
| 1518 | 1764 | 0 |
| 1519 | 1765 | 0 |
| 1520 | 1766 | 0 |
| 1521 | 1767 | 0 |
| 1522 | 1768 | 0 |
| 1523 | 1769 | 0 |
| 1524 | 1770 | 0 |
| 1525 | 1771 | 0 |
| 1526 | 1772 | 0 |
| 1527 | 1773 | 0 |
| 1528 | 1774 | 0 |
| 1529 | 1776 | 0 |
| 1530 | 1777 | 0 |
| 1531 | 1778 | 0 |
| 1532 | 1779 | 0 |
| 1533 | 1780 | 0 |
| 1534 | 1781 | 0 |
| 1535 | 1782 | 0 |
| 1536 | 1783 | 0 |
| 1537 | 1784 | 0 |
| 1538 | 1785 | 0 |
| 1539 | 1786 | 0 |
| 1540 | 1787 | 0 |
| 1541 | 1788 | 0 |
| 1542 | 1789 | 0 |
| 1543 | 1790 | 0 |
| 1544 | 1791 | 0 |
| 1545 | 1792 | 0 |
| 1546 | 1793 | 0 |
| 1547 | 1794 | 0 |
| 1548 | 1796 | 0 |
| 1549 | 1797 | 0 |
| 1550 | 1798 | 0 |
| 1551 | 1799 | 0 |
| 1552 | 1800 | 0 |
| 1553 | 1801 | 0 |
| 1554 | 1802 | 0 |
| 1555 | 1803 | 0 |
| 1556 | 1804 | 0 |
| 1557 | 1805 | 0 |
| 1558 | 1806 | 0 |
| 1559 | 1807 | 0 |
| 1560 | 1808 | 0 |
| 1561 | 1809 | 0 |
| 1562 | 1810 | 0 |
| 1563 | 1811 | 0 |
| 1564 | 1812 | 0 |
| 1565 | 1813 | 0 |
| 1566 | 1814 | 0 |
| 1567 | 1815 | 0 |
| 1568 | 1816 | 0 |
| 1569 | 1817 | 0 |
| 1570 | 1818 | 0 |
| 1571 | 1819 | 0 |
| 1572 | 1820 | 0 |
| 1573 | 1821 | 0 |
| 1574 | 1822 | 0 |
| 1575 | 1823 | 0 |
| 1576 | 1824 | 0 |
| 1577 | 1825 | 0 |
| 1578 | 1827 | 0 |
| 1579 | 1828 | 0 |
| 1580 | 1829 | 0 |
| 1581 | 1830 | 0 |
| 1582 | 1831 | 0 |
| 1583 | 1832 | 0 |
| 1584 | 1833 | 0 |
| 1585 | 1834 | 0 |
| 1586 | 1835 | 0 |
| 1587 | 1836 | 0 |
| 1588 | 1837 | 0 |
| 1589 | 1838 | 0 |
| 1590 | 1839 | 0 |
| 1591 | 1840 | 0 |
| 1592 | 1841 | 0 |
| 1593 | 1842 | 0 |
| 1594 | 1843 | 0 |
| 1595 | 1844 | 0 |
| 1596 | 1845 | 0 |
| 1597 | 1846 | 0 |
| 1598 | 1847 | 0 |
| 1599 | 1848 | 0 |
| 1600 | 1849 | 0 |
| 1601 | 1850 | 0 |
| 1602 | 1851 | 0 |
| 1603 | 1852 | 0 |
| 1604 | 1853 | 0 |
| 1605 | 1854 | 0 |
| 1606 | 1855 | 0 |
| 1607 | 1856 | 0 |
| 1608 | 1857 | 0 |
| 1609 | 1858 | 0 |
| 1610 | 1859 | 0 |
| 1611 | 1860 | 0 |
| 1612 | 1861 | 0 |
| 1613 | 1862 | 0 |
| 1614 | 1863 | 0 |
| 1615 | 1865 | 0 |
| 1616 | 1866 | 0 |
| 1617 | 1867 | 0 |
| 1618 | 1868 | 0 |
| 1619 | 1869 | 0 |
| 1620 | 1870 | 0 |
| 1621 | 1871 | 0 |
| 1622 | 1872 | 0 |
| 1623 | 1873 | 0 |
| 1624 | 1874 | 0 |
| 1625 | 1875 | 0 |
| 1626 | 1876 | 0 |
| 1627 | 1877 | 0 |
| 1628 | 1878 | 0 |
| 1629 | 1880 | 0 |
| 1630 | 1881 | 0 |
| 1631 | 1882 | 0 |
| 1632 | 1883 | 0 |
| 1633 | 1884 | 0 |
| 1634 | 1885 | 0 |
| 1635 | 1886 | 0 |
| 1636 | 1910 | 0 |
| 1637 | 1911 | 0 |
| 1638 | 1912 | 0 |
| 1639 | 1913 | 0 |
| 1640 | 1914 | 0 |
| 1641 | 1915 | 0 |
| 1642 | 1916 | 0 |
| 1643 | 1917 | 0 |
| 1644 | 1918 | 0 |
| 1645 | 1919 | 0 |
| 1646 | 1920 | 0 |
| 1647 | 1921 | 0 |
| 1648 | 1922 | 0 |
| 1649 | 1923 | 0 |
| 1650 | 1924 | 0 |
| 1651 | 1925 | 0 |
| 1652 | 1926 | 0 |
| 1653 | 1927 | 0 |
| 1654 | 1928 | 0 |
| 1655 | 1929 | 0 |
| 1656 | 1930 | 0 |
| 1657 | 1931 | 0 |
| 1658 | 1932 | 0 |
| 1659 | 1934 | 0 |
| 1660 | 1935 | 0 |
| 1661 | 1936 | 0 |
| 1662 | 1937 | 0 |
| 1663 | 1938 | 0 |
| 1664 | 1939 | 0 |
| 1665 | 1940 | 0 |
| 1666 | 1941 | 0 |
| 1667 | 1942 | 0 |
| 1668 | 1943 | 0 |
| 1669 | 1944 | 0 |
| 1670 | 1945 | 0 |
| 1671 | 1946 | 0 |
| 1672 | 1947 | 0 |
| 1673 | 1948 | 0 |
| 1674 | 1949 | 0 |
| 1675 | 1950 | 0 |
| 1676 | 1951 | 0 |
| 1677 | 1952 | 0 |
| 1678 | 1953 | 0 |
| 1679 | 1955 | 0 |
| 1680 | 1956 | 0 |
| 1681 | 1957 | 0 |
| 1682 | 1958 | 0 |
| 1683 | 1959 | 0 |
| 1684 | 1960 | 0 |
| 1685 | 1961 | 0 |
| 1686 | 1962 | 0 |
| 1687 | 1963 | 0 |
| 1688 | 1964 | 0 |
| 1689 | 1965 | 0 |
| 1690 | 1966 | 0 |
| 1691 | 1967 | 0 |
| 1692 | 1968 | 0 |
| 1693 | 1969 | 0 |
| 1694 | 1970 | 0 |
| 1695 | 1971 | 0 |
| 1696 | 1972 | 0 |
| 1697 | 1973 | 0 |
| 1698 | 1974 | 0 |
| 1699 | 1975 | 0 |
| 1700 | 1976 | 0 |
| 1701 | 1977 | 0 |
| 1702 | 1978 | 0 |
| 1703 | 1979 | 0 |
| 1704 | 1980 | 0 |
| 1705 | 1981 | 0 |
| 1706 | 1982 | 0 |
| 1707 | 1984 | 0 |
| 1708 | 1985 | 0 |
| 1709 | 1986 | 0 |
| 1710 | 1987 | 0 |
| 1711 | 1989 | 0 |
| 1712 | 1990 | 0 |
| 1713 | 1991 | 0 |
| 1714 | 1992 | 0 |
| 1715 | 1993 | 0 |
| 1716 | 1994 | 0 |
| 1717 | 1995 | 0 |
| 1718 | 1996 | 0 |
| 1719 | 1997 | 0 |
| 1720 | 1998 | 0 |
| 1721 | 1999 | 0 |
| 1722 | 2000 | 0 |
| 1723 | 2001 | 0 |
| 1724 | 2002 | 0 |
| 1725 | 2003 | 0 |
| 1726 | 2004 | 0 |
| 1727 | 2005 | 0 |
| 1728 | 2006 | 0 |
| 1729 | 2007 | 0 |
| 1730 | 2008 | 0 |
| 1731 | 2009 | 0 |
| 1732 | 2010 | 0 |
| 1733 | 2013 | 0 |
| 1734 | 2014 | 0 |
| 1735 | 2015 | 0 |
| 1736 | 2016 | 0 |
| 1737 | 2017 | 0 |
| 1738 | 2019 | 0 |
| 1739 | 2023 | 0 |
| 1740 | 2024 | 0 |
| 1741 | 2025 | 0 |
| 1742 | 2048 | 0 |
| 1743 | 2049 | 0 |
| 1744 | 2050 | 0 |
| 1745 | 2051 | 0 |
| 1746 | 2052 | 0 |
| 1747 | 2053 | 0 |
| 1748 | 2054 | 0 |
| 1749 | 2055 | 0 |
| 1750 | 2056 | 0 |
| 1751 | 2057 | 0 |
| 1752 | 2058 | 0 |
| 1753 | 2059 | 0 |
| 1754 | 2060 | 0 |
| 1755 | 2061 | 0 |
| 1756 | 2062 | 0 |
| 1757 | 2063 | 0 |
| 1758 | 2064 | 0 |
| 1759 | 2065 | 0 |
| 1760 | 2066 | 0 |
| 1761 | 2067 | 0 |
| 1762 | 2069 | 0 |
| 1763 | 2070 | 0 |
| 1764 | 2071 | 0 |
| 1765 | 2072 | 0 |
| 1766 | 2073 | 0 |
| 1767 | 2074 | 0 |
| 1768 | 2075 | 0 |
| 1769 | 2076 | 0 |
| 1770 | 2077 | 0 |
| 1771 | 2078 | 0 |
| 1772 | 2079 | 0 |
| 1773 | 2080 | 0 |
| 1774 | 2081 | 0 |
| 1775 | 2082 | 0 |
| 1776 | 2083 | 0 |
| 1777 | 2084 | 0 |
| 1778 | 2085 | 0 |
| 1779 | 2086 | 0 |
| 1780 | 2100 | 0 |
| 1781 | 2101 | 0 |
| 1782 | 2102 | 0 |
| 1783 | 2103 | 0 |
| 1784 | 2104 | 0 |
| 1785 | 2105 | 0 |
| 1786 | 2106 | 0 |
| 1787 | 2107 | 0 |
| 1788 | 2108 | 0 |
| 1789 | 2109 | 0 |
| 1790 | 2110 | 0 |
| 1791 | 2111 | 0 |
| 1792 | 2112 | 0 |
| 1793 | 2113 | 0 |
| 1794 | 2114 | 0 |
| 1795 | 2115 | 0 |
| 1796 | 2116 | 0 |
| 1797 | 2119 | 0 |
| 1798 | 2120 | 0 |
| 1799 | 2121 | 0 |
| 1800 | 2122 | 0 |
| 1801 | 2123 | 0 |
| 1802 | 2143 | 0 |
| 1803 | 2144 | 0 |
| 1804 | 2145 | 0 |
| 1805 | 2146 | 0 |
| 1806 | 2147 | 0 |
| 1807 | 2148 | 0 |
| 1808 | 2149 | 0 |
| 1809 | 2150 | 0 |
| 1810 | 2151 | 0 |
| 1811 | 2152 | 0 |
| 1812 | 2153 | 0 |
| 1813 | 2154 | 0 |
| 1814 | 2155 | 0 |
| 1815 | 2156 | 0 |
| 1816 | 2157 | 0 |
| 1817 | 2158 | 0 |
| 1818 | 2159 | 0 |
| 1819 | 2160 | 0 |
| 1820 | 2161 | 0 |
| 1821 | 2162 | 0 |
| 1822 | 2163 | 0 |
| 1823 | 2164 | 0 |
| 1824 | 2165 | 0 |
| 1825 | 2166 | 0 |
| 1826 | 2167 | 0 |
| 1827 | 2168 | 0 |
| 1828 | 2169 | 0 |
| 1829 | 2170 | 0 |
| 1830 | 2171 | 0 |
| 1831 | 2172 | 0 |
| 1832 | 2173 | 0 |
| 1833 | 2196 | 0 |
| 1834 | 2197 | 0 |
| 1835 | 2198 | 0 |
| 1836 | 2199 | 0 |
| 1837 | 2200 | 0 |
| 1838 | 2201 | 0 |
| 1839 | 2202 | 0 |
| 1840 | 2203 | 0 |
| 1841 | 2204 | 0 |
| 1842 | 2205 | 0 |
| 1843 | 2206 | 0 |
| 1844 | 2207 | 0 |
| 1845 | 2208 | 0 |
| 1846 | 2209 | 0 |
| 1847 | 2210 | 0 |
| 1848 | 2211 | 0 |
| 1849 | 2212 | 0 |
| 1850 | 2213 | 0 |
| 1851 | 2214 | 0 |
| 1852 | 2215 | 0 |
| 1853 | 2216 | 0 |
| 1854 | 2217 | 0 |
| 1855 | 2218 | 0 |
| 1856 | 2219 | 0 |
| 1857 | 2220 | 0 |
| 1858 | 2221 | 0 |
| 1859 | 2222 | 0 |
| 1860 | 2223 | 0 |
| 1861 | 2224 | 0 |
| 1862 | 2225 | 0 |
| 1863 | 2226 | 0 |
| 1864 | 2227 | 0 |
| 1865 | 2228 | 0 |
| 1866 | 2229 | 0 |
| 1867 | 2230 | 0 |
| 1868 | 2231 | 0 |
| 1869 | 2232 | 0 |
| 1870 | 2233 | 0 |
| 1871 | 2234 | 0 |
| 1872 | 2235 | 0 |
| 1873 | 2236 | 0 |
| 1874 | 2237 | 0 |
| 1875 | 2238 | 0 |
| 1876 | 2239 | 0 |
| 1877 | 2240 | 0 |
| 1878 | 2241 | 0 |
| 1879 | 2242 | 0 |
| 1880 | 2243 | 0 |
| 1881 | 2244 | 0 |
| 1882 | 2245 | 0 |
| 1883 | 2246 | 0 |
| 1884 | 2247 | 0 |
| 1885 | 2248 | 0 |
| 1886 | 2249 | 0 |
| 1887 | 2250 | 0 |
| 1888 | 2251 | 0 |
| 1889 | 2252 | 0 |
| 1890 | 2253 | 0 |
| 1891 | 2254 | 0 |
| 1892 | 2255 | 0 |
| 1893 | 2256 | 0 |
| 1894 | 2257 | 0 |
| 1895 | 2258 | 0 |
| 1896 | 2259 | 0 |
| 1897 | 2260 | 0 |
| 1898 | 2261 | 0 |
| 1899 | 2262 | 0 |
| 1900 | 2263 | 0 |
| 1901 | 2264 | 0 |
| 1902 | 2265 | 0 |
| 1903 | 2266 | 0 |
| 1904 | 2267 | 0 |
| 1905 | 2268 | 0 |
| 1906 | 2269 | 0 |
| 1907 | 2270 | 0 |
| 1908 | 2271 | 0 |
| 1909 | 2272 | 0 |
| 1910 | 2273 | 0 |
| 1911 | 2274 | 0 |
| 1912 | 2275 | 0 |
| 1913 | 2276 | 0 |
| 1914 | 2277 | 0 |
| 1915 | 2278 | 0 |
| 1916 | 2279 | 0 |
| 1917 | 2280 | 0 |
| 1918 | 2281 | 0 |
| 1919 | 2282 | 0 |
| 1920 | 2283 | 0 |
| 1921 | 2286 | 0 |
| 1922 | 2287 | 0 |
| 1923 | 2288 | 0 |
| 1924 | 2289 | 0 |
| 1925 | 2290 | 0 |
| 1926 | 2291 | 0 |
| 1927 | 2292 | 0 |
| 1928 | 2293 | 0 |
| 1929 | 2294 | 0 |
| 1930 | 2295 | 0 |
| 1931 | 2296 | 0 |
| 1932 | 2297 | 0 |
| 1933 | 2298 | 0 |
| 1934 | 2299 | 0 |
| 1935 | 2300 | 0 |
| 1936 | 2301 | 0 |
| 1937 | 2302 | 0 |
| 1938 | 2303 | 0 |
| 1939 | 2304 | 0 |
| 1940 | 2305 | 0 |
| 1941 | 2306 | 0 |
| 1942 | 2307 | 0 |
| 1943 | 2308 | 0 |
| 1944 | 2309 | 0 |
| 1945 | 2310 | 0 |
| 1946 | 2311 | 0 |
| 1947 | 2312 | 0 |
| 1948 | 2313 | 0 |
| 1949 | 2314 | 0 |
| 1950 | 2315 | 0 |
| 1951 | 2316 | 0 |
| 1952 | 2317 | 0 |
| 1953 | 2318 | 0 |
| 1954 | 2319 | 0 |
| 1955 | 2320 | 0 |
| 1956 | 2321 | 0 |
| 1957 | 2323 | 0 |
| 1958 | 2324 | 0 |
| 1959 | 2325 | 0 |
| 1960 | 2326 | 0 |
| 1961 | 2327 | 0 |
| 1962 | 2328 | 0 |
| 1963 | 2329 | 0 |
| 1964 | 2330 | 0 |
| 1965 | 2331 | 0 |
| 1966 | 2332 | 0 |
| 1967 | 2333 | 0 |
| 1968 | 2334 | 0 |
| 1969 | 2335 | 0 |
| 1970 | 2336 | 0 |
| 1971 | 2337 | 0 |
| 1972 | 2338 | 0 |
| 1973 | 2339 | 0 |
| 1974 | 2340 | 0 |
| 1975 | 2341 | 0 |
| 1976 | 2342 | 0 |
| 1977 | 2343 | 0 |
| 1978 | 2344 | 0 |
| 1979 | 2345 | 0 |
| 1980 | 2363 | 0 |
| 1981 | 2364 | 0 |
| 1982 | 2365 | 0 |
| 1983 | 2366 | 0 |
| 1984 | 2367 | 0 |
| 1985 | 2368 | 0 |
| 1986 | 2369 | 0 |
| 1987 | 2370 | 0 |
| 1988 | 2371 | 0 |
| 1989 | 2372 | 0 |
| 1990 | 2373 | 0 |
| 1991 | 2374 | 0 |
| 1992 | 2375 | 0 |
| 1993 | 2376 | 0 |
| 1994 | 2377 | 0 |
| 1995 | 2378 | 0 |
| 1996 | 2397 | 0 |
| 1997 | 2398 | 0 |
| 1998 | 2399 | 0 |
| 1999 | 2400 | 0 |
| 2000 | 2401 | 0 |
| 2001 | 2402 | 0 |
| 2002 | 2403 | 0 |
| 2003 | 2404 | 0 |
| 2004 | 2405 | 0 |
| 2005 | 2406 | 0 |
| 2006 | 2407 | 0 |
| 2007 | 2408 | 0 |
| 2008 | 2409 | 0 |
| 2009 | 2410 | 0 |
| 2010 | 2411 | 0 |
| 2011 | 2412 | 0 |
| 2012 | 2413 | 0 |
| 2013 | 2414 | 0 |
| 2014 | 2415 | 0 |
| 2015 | 2416 | 0 |
| 2016 | 2418 | 0 |
| 2017 | 2419 | 0 |
| 2018 | 2420 | 0 |
| 2019 | 2421 | 0 |
| 2020 | 2422 | 0 |
| 2021 | 2423 | 0 |
| 2022 | 2424 | 0 |
| 2023 | 2425 | 0 |
| 2024 | 2426 | 0 |
| 2025 | 2427 | 0 |
| 2026 | 2428 | 0 |
| 2027 | 2429 | 0 |
| 2028 | 2430 | 0 |
| 2029 | 2431 | 0 |
| 2030 | 2432 | 0 |
| 2031 | 2434 | 0 |
| 2032 | 2435 | 0 |
| 2033 | 2436 | 0 |
| 2034 | 2437 | 0 |
| 2035 | 2438 | 0 |
| 2036 | 2439 | 0 |
| 2037 | 2440 | 0 |
| 2038 | 2441 | 0 |
| 2039 | 2443 | 0 |
| 2040 | 2444 | 0 |
| 2041 | 2445 | 0 |
| 2042 | 2446 | 0 |
| 2043 | 2447 | 0 |
| 2044 | 2448 | 0 |
| 2045 | 2449 | 0 |
| 2046 | 2450 | 0 |
| 2047 | 2451 | 0 |
| 2048 | 2452 | 0 |
| 2049 | 2453 | 0 |
| 2050 | 2454 | 0 |
| 2051 | 2455 | 0 |
| 2052 | 2456 | 0 |
| 2053 | 2458 | 0 |
| 2054 | 2459 | 0 |
| 2055 | 2460 | 0 |
| 2056 | 2461 | 0 |
| 2057 | 2462 | 0 |
| 2058 | 2463 | 0 |
| 2059 | 2464 | 0 |
| 2060 | 2465 | 0 |
| 2061 | 2466 | 0 |
| 2062 | 2467 | 0 |
| 2063 | 2468 | 0 |
| 2064 | 2469 | 0 |
| 2065 | 2470 | 0 |
| 2066 | 2471 | 0 |
| 2067 | 2472 | 0 |
| 2068 | 2473 | 0 |
| 2069 | 2474 | 0 |
| 2070 | 2475 | 0 |
| 2071 | 2476 | 0 |
| 2072 | 2477 | 0 |
| 2073 | 2478 | 0 |
| 2074 | 2479 | 0 |
| 2075 | 2481 | 0 |
| 2076 | 2482 | 0 |
| 2077 | 2483 | 0 |
| 2078 | 2484 | 0 |
| 2079 | 2485 | 0 |
| 2080 | 2503 | 0 |
| 2081 | 2504 | 0 |
| 2082 | 2505 | 0 |
| 2083 | 2506 | 0 |
| 2084 | 2507 | 0 |
| 2085 | 2508 | 0 |
| 2086 | 2509 | 0 |
| 2087 | 2510 | 0 |
| 2088 | 2511 | 0 |
| 2089 | 2512 | 0 |
| 2090 | 2513 | 0 |
| 2091 | 2514 | 0 |
| 2092 | 2515 | 0 |
| 2093 | 2516 | 0 |
| 2094 | 2517 | 0 |
| 2095 | 2518 | 0 |
| 2096 | 2519 | 0 |
| 2097 | 2520 | 0 |
| 2098 | 2521 | 0 |
| 2099 | 2522 | 0 |
| 2100 | 2523 | 0 |
| 2101 | 2524 | 0 |
| 2102 | 2525 | 0 |
| 2103 | 2526 | 0 |
| 2104 | 2527 | 0 |
| 2105 | 2528 | 0 |
| 2106 | 2529 | 0 |
| 2107 | 2530 | 0 |
| 2108 | 2531 | 0 |
| 2109 | 2532 | 0 |
| 2110 | 2533 | 0 |
| 2111 | 2534 | 0 |
| 2112 | 2535 | 0 |
| 2113 | 2536 | 0 |
| 2114 | 2537 | 0 |
| 2115 | 2538 | 0 |
| 2116 | 2539 | 0 |
| 2117 | 2540 | 0 |
| 2118 | 2542 | 0 |
| 2119 | 2543 | 0 |
| 2120 | 2544 | 0 |
| 2121 | 2545 | 0 |
| 2122 | 2546 | 0 |
| 2123 | 2547 | 0 |
| 2124 | 2548 | 0 |
| 2125 | 2549 | 0 |
| 2126 | 2550 | 0 |
| 2127 | 2551 | 0 |
| 2128 | 2552 | 0 |
| 2129 | 2553 | 0 |
| 2130 | 2571 | 0 |
| 2131 | 2572 | 0 |
| 2132 | 2573 | 0 |
| 2133 | 2574 | 0 |
| 2134 | 2575 | 0 |
| 2135 | 2576 | 0 |
| 2136 | 2577 | 0 |
| 2137 | 2578 | 0 |
| 2138 | 2579 | 0 |
| 2139 | 2580 | 0 |
| 2140 | 2581 | 0 |
| 2141 | 2582 | 0 |
| 2142 | 2583 | 0 |
| 2143 | 2584 | 0 |
| 2144 | 2585 | 0 |
| 2145 | 2586 | 0 |
| 2146 | 2587 | 0 |
| 2147 | 2588 | 0 |
| 2148 | 2589 | 0 |
| 2149 | 2590 | 0 |
| 2150 | 2591 | 0 |
| 2151 | 2592 | 0 |
| 2152 | 2593 | 0 |
| 2153 | 2594 | 0 |
| 2154 | 2595 | 0 |
| 2155 | 2596 | 0 |
| 2156 | 2597 | 0 |
| 2157 | 2598 | 0 |
| 2158 | 2599 | 0 |
| 2159 | 2600 | 0 |
| 2160 | 2601 | 0 |
| 2161 | 2602 | 0 |
| 2162 | 2603 | 0 |
| 2163 | 2604 | 0 |
| 2164 | 2605 | 0 |
| 2165 | 2606 | 0 |
| 2166 | 2607 | 0 |
| 2167 | 2608 | 0 |
| 2168 | 2609 | 0 |
| 2169 | 2610 | 0 |
| 2170 | 2611 | 0 |
| 2171 | 2612 | 0 |
| 2172 | 2613 | 0 |
| 2173 | 2614 | 0 |
| 2174 | 2615 | 0 |
| 2175 | 2616 | 0 |
| 2176 | 2634 | 0 |
| 2177 | 2635 | 0 |
| 2178 | 2636 | 0 |
| 2179 | 2637 | 0 |
| 2180 | 2638 | 0 |
| 2181 | 2639 | 0 |
| 2182 | 2640 | 0 |
| 2183 | 2641 | 0 |
| 2184 | 2642 | 0 |
| 2185 | 2643 | 0 |
| 2186 | 2644 | 0 |
| 2187 | 2645 | 0 |
| 2188 | 2646 | 0 |
| 2189 | 2647 | 0 |
| 2190 | 2648 | 0 |
| 2191 | 2649 | 0 |
| 2192 | 2650 | 0 |
| 2193 | 2651 | 0 |
| 2194 | 2652 | 0 |
| 2195 | 2653 | 0 |
| 2196 | 2654 | 0 |
| 2197 | 2655 | 0 |
| 2198 | 2656 | 0 |
| 2199 | 2657 | 0 |
| 2200 | 2658 | 0 |
| 2201 | 2659 | 0 |
| 2202 | 2660 | 0 |
| 2203 | 2661 | 0 |
| 2204 | 2662 | 0 |
| 2205 | 2663 | 0 |
| 2206 | 2664 | 0 |
| 2207 | 2665 | 0 |
| 2208 | 2666 | 0 |
| 2209 | 2667 | 0 |
| 2210 | 2668 | 0 |
| 2211 | 2669 | 0 |
| 2212 | 2670 | 0 |
| 2213 | 2671 | 0 |
| 2214 | 2672 | 0 |
| 2215 | 2673 | 0 |
| 2216 | 2674 | 0 |
| 2217 | 2675 | 0 |
| 2218 | 2676 | 0 |
| 2219 | 2677 | 0 |
| 2220 | 2678 | 0 |
| 2221 | 2679 | 0 |
| 2222 | 2680 | 0 |
| 2223 | 2681 | 0 |
| 2224 | 2682 | 0 |
| 2225 | 2683 | 0 |
| 2226 | 2684 | 0 |
| 2227 | 2685 | 0 |
| 2228 | 2686 | 0 |
| 2229 | 2687 | 0 |
| 2230 | 2688 | 0 |
| 2231 | 2689 | 0 |
| 2232 | 2690 | 0 |
| 2233 | 2691 | 0 |
| 2234 | 2692 | 0 |
| 2235 | 2693 | 0 |
| 2236 | 2694 | 0 |
| 2237 | 2695 | 0 |
| 2238 | 2696 | 0 |
| 2239 | 2697 | 0 |
| 2240 | 2698 | 0 |
| 2241 | 2699 | 0 |
| 2242 | 2700 | 0 |
| 2243 | 2701 | 0 |
| 2244 | 2702 | 0 |
| 2245 | 2703 | 0 |
| 2246 | 2704 | 0 |
| 2247 | 2705 | 0 |
| 2248 | 2706 | 0 |
| 2249 | 2707 | 0 |
| 2250 | 2708 | 0 |
| 2251 | 2709 | 0 |
| 2252 | 2710 | 0 |
| 2253 | 2711 | 0 |
| 2254 | 2712 | 0 |
| 2255 | 2713 | 0 |
| 2256 | 2714 | 0 |
| 2257 | 2715 | 0 |
| 2258 | 2716 | 0 |
| 2259 | 2717 | 0 |
| 2260 | 2718 | 0 |
| 2261 | 2719 | 0 |
| 2262 | 2720 | 0 |
| 2263 | 2721 | 0 |
| 2264 | 2722 | 0 |
| 2265 | 2723 | 0 |
| 2266 | 2724 | 0 |
| 2267 | 2725 | 0 |
| 2268 | 2726 | 0 |
| 2269 | 2727 | 0 |
| 2270 | 2728 | 0 |
| 2271 | 2729 | 0 |
| 2272 | 2730 | 0 |
| 2273 | 2731 | 0 |
| 2274 | 2732 | 0 |
| 2275 | 2733 | 0 |
| 2276 | 2734 | 0 |
| 2277 | 2735 | 0 |
| 2278 | 2736 | 0 |
| 2279 | 2737 | 0 |
| 2280 | 2738 | 0 |
| 2281 | 2739 | 0 |
| 2282 | 2740 | 0 |
| 2283 | 2741 | 0 |
| 2284 | 2742 | 0 |
| 2285 | 2743 | 0 |
| 2286 | 2744 | 0 |
| 2287 | 2745 | 0 |
| 2288 | 2746 | 0 |
| 2289 | 2747 | 0 |
| 2290 | 2748 | 0 |
| 2291 | 2749 | 0 |
| 2292 | 2750 | 0 |
| 2293 | 2751 | 0 |
| 2294 | 2752 | 0 |
| 2295 | 2753 | 0 |
| 2296 | 2754 | 0 |
| 2297 | 2755 | 0 |
| 2298 | 2756 | 0 |
| 2299 | 2757 | 0 |
| 2300 | 2759 | 0 |
| 2301 | 2760 | 0 |
| 2302 | 2761 | 0 |
| 2303 | 2762 | 0 |
| 2304 | 2763 | 0 |
| 2305 | 2764 | 0 |
| 2306 | 2765 | 0 |
| 2307 | 2766 | 0 |
| 2308 | 2767 | 0 |
| 2309 | 2768 | 0 |
| 2310 | 2769 | 0 |
| 2311 | 2770 | 0 |
| 2312 | 2771 | 0 |
| 2313 | 2772 | 0 |
| 2314 | 2773 | 0 |
| 2315 | 2774 | 0 |
| 2316 | 2775 | 0 |
| 2317 | 2776 | 0 |
| 2318 | 2778 | 0 |
| 2319 | 2779 | 0 |
| 2320 | 2780 | 0 |
| 2321 | 2781 | 0 |
| 2322 | 2782 | 0 |
| 2323 | 2783 | 0 |
| 2324 | 2784 | 0 |
| 2325 | 2785 | 0 |
| 2326 | 2786 | 0 |
| 2327 | 2787 | 0 |
| 2328 | 2788 | 0 |
| 2329 | 2789 | 0 |
| 2330 | 2790 | 0 |
| 2331 | 2791 | 0 |
| 2332 | 2792 | 0 |
| 2333 | 2793 | 0 |
| 2334 | 2811 | 0 |
| 2335 | 2812 | 0 |
| 2336 | 2813 | 0 |
| 2337 | 2814 | 0 |
| 2338 | 2815 | 0 |
| 2339 | 2816 | 0 |
| 2340 | 2817 | 0 |
| 2341 | 2818 | 0 |
| 2342 | 2819 | 0 |
| 2343 | 2820 | 0 |
| 2344 | 2821 | 0 |
| 2345 | 2822 | 0 |
| 2346 | 2823 | 0 |
| 2347 | 2824 | 0 |
| 2348 | 2825 | 0 |
| 2349 | 2826 | 0 |
| 2350 | 2827 | 0 |
| 2351 | 2828 | 0 |
| 2352 | 2829 | 0 |
| 2353 | 2830 | 0 |
| 2354 | 2831 | 0 |
| 2355 | 2832 | 0 |
| 2356 | 2833 | 0 |
| 2357 | 2834 | 0 |
| 2358 | 2836 | 0 |
| 2359 | 2837 | 0 |
| 2360 | 2838 | 0 |
| 2361 | 2839 | 0 |
| 2362 | 2840 | 0 |
| 2363 | 2841 | 0 |
| 2364 | 2842 | 0 |
| 2365 | 2843 | 0 |
| 2366 | 2844 | 0 |
| 2367 | 2845 | 0 |
| 2368 | 2846 | 0 |
| 2369 | 2847 | 0 |
| 2370 | 2848 | 0 |
| 2371 | 2849 | 0 |
| 2372 | 2850 | 0 |
| 2373 | 2851 | 0 |
| 2374 | 2852 | 0 |
| 2375 | 2853 | 0 |
| 2376 | 2854 | 0 |
| 2377 | 2855 | 0 |
| 2378 | 2856 | 0 |
| 2379 | 2857 | 0 |
| 2380 | 2858 | 0 |
| 2381 | 2860 | 0 |
| 2382 | 2861 | 0 |
| 2383 | 2862 | 0 |
| 2384 | 2863 | 0 |
| 2385 | 2864 | 0 |
| 2386 | 2865 | 0 |
| 2387 | 2866 | 0 |
| 2388 | 2867 | 0 |
| 2389 | 2868 | 0 |
| 2390 | 2869 | 0 |
| 2391 | 2870 | 0 |
| 2392 | 2871 | 0 |
| 2393 | 2872 | 0 |
| 2394 | 2873 | 0 |
| 2395 | 2874 | 0 |
| 2396 | 2875 | 0 |
| 2397 | 2876 | 0 |
| 2398 | 2877 | 0 |
| 2399 | 2878 | 0 |
| 2400 | 2880 | 0 |
| 2401 | 2881 | 0 |
| 2402 | 2882 | 0 |
| 2403 | 2883 | 0 |
| 2404 | 2884 | 0 |
| 2405 | 2885 | 0 |
| 2406 | 2886 | 0 |
| 2407 | 2887 | 0 |
| 2408 | 2888 | 0 |
| 2409 | 2889 | 0 |
| 2410 | 2890 | 0 |
| 2411 | 2891 | 0 |
| 2412 | 2892 | 0 |
| 2413 | 2893 | 0 |
| 2414 | 2894 | 0 |
| 2415 | 2895 | 0 |
| 2416 | 2896 | 0 |
| 2417 | 2898 | 0 |
| 2418 | 2899 | 0 |
| 2419 | 2900 | 0 |
| 2420 | 2901 | 0 |
| 2421 | 2902 | 0 |
| 2422 | 2903 | 0 |
| 2423 | 2905 | 0 |
| 2424 | 2906 | 0 |
| 2425 | 2907 | 0 |
| 2426 | 2908 | 0 |
| 2427 | 2909 | 0 |
| 2428 | 2910 | 0 |
| 2429 | 2911 | 0 |
| 2430 | 2912 | 0 |
| 2431 | 2913 | 0 |
| 2432 | 2914 | 0 |
| 2433 | 2915 | 0 |
| 2434 | 2916 | 0 |
| 2435 | 2917 | 0 |
| 2436 | 2918 | 0 |
| 2437 | 2919 | 0 |
| 2438 | 2920 | 0 |
| 2439 | 2921 | 0 |
| 2440 | 2922 | 0 |
| 2441 | 2923 | 0 |
| 2442 | 2924 | 0 |
| 2443 | 2925 | 0 |
| 2444 | 2926 | 0 |
| 2445 | 2927 | 0 |
| 2446 | 2928 | 0 |
| 2447 | 2929 | 0 |
| 2448 | 2930 | 0 |
| 2449 | 2931 | 0 |
| 2450 | 2932 | 0 |
| 2451 | 2933 | 0 |
| 2452 | 2934 | 0 |
| 2453 | 2935 | 0 |
| 2454 | 2936 | 0 |
| 2455 | 2937 | 0 |
| 2456 | 2938 | 0 |
| 2457 | 2939 | 0 |
| 2458 | 2940 | 0 |
| 2459 | 2941 | 0 |
| 2460 | 2942 | 0 |
| 2461 | 2943 | 0 |
| 2462 | 2944 | 0 |
| 2463 | 2945 | 0 |
| 2464 | 2946 | 0 |
| 2465 | 2947 | 0 |
| 2466 | 2948 | 0 |
| 2467 | 2949 | 0 |
| 2468 | 2950 | 0 |
| 2469 | 2951 | 0 |
| 2470 | 2952 | 0 |
| 2471 | 2973 | 0 |
| 2472 | 2974 | 0 |
| 2473 | 2975 | 0 |
| 2474 | 2976 | 0 |
| 2475 | 2977 | 0 |
| 2476 | 2978 | 0 |
| 2477 | 2979 | 0 |
| 2478 | 2980 | 0 |
| 2479 | 2981 | 0 |
| 2480 | 2982 | 0 |
| 2481 | 2983 | 0 |
| 2482 | 2984 | 0 |
| 2483 | 2985 | 0 |
| 2484 | 2986 | 0 |
| 2485 | 2987 | 0 |
| 2486 | 2988 | 0 |
| 2487 | 2989 | 0 |
| 2488 | 2990 | 0 |
| 2489 | 2991 | 0 |
| 2490 | 2992 | 0 |
| 2491 | 2993 | 0 |
| 2492 | 2994 | 0 |
| 2493 | 2995 | 0 |
| 2494 | 2996 | 0 |
| 2495 | 2997 | 0 |
| 2496 | 2998 | 0 |
| 2497 | 2999 | 0 |
| 2498 | 3000 | 0 |
| 2499 | 3001 | 0 |
| 2500 | 3002 | 0 |
| 2501 | 3003 | 0 |
| 2502 | 3004 | 0 |
| 2503 | 3005 | 0 |
| 2504 | 3006 | 0 |
| 2505 | 3007 | 0 |
| 2506 | 3009 | 0 |
| 2507 | 3010 | 0 |
| 2508 | 3011 | 0 |
| 2509 | 3012 | 0 |
| 2510 | 3013 | 0 |
| 2511 | 3014 | 0 |
| 2512 | 3015 | 0 |
| 2513 | 3016 | 0 |
| 2514 | 3017 | 0 |
| 2515 | 3018 | 0 |
| 2516 | 3019 | 0 |
| 2517 | 3020 | 0 |
| 2518 | 3021 | 0 |
| 2519 | 3022 | 0 |
| 2520 | 3023 | 0 |
| 2521 | 3024 | 0 |
| 2522 | 3025 | 0 |
| 2523 | 3026 | 0 |
| 2524 | 3027 | 0 |
| 2525 | 3028 | 0 |
| 2526 | 3030 | 0 |
| 2527 | 3031 | 0 |
| 2528 | 3032 | 0 |
| 2529 | 3033 | 0 |
| 2530 | 3034 | 0 |
| 2531 | 3035 | 0 |
| 2532 | 3036 | 0 |
| 2533 | 3037 | 0 |
| 2534 | 3038 | 0 |
| 2535 | 3039 | 0 |
| 2536 | 3040 | 0 |
| 2537 | 3041 | 0 |
| 2538 | 3042 | 0 |
| 2539 | 3043 | 0 |
| 2540 | 3044 | 0 |
| 2541 | 3045 | 0 |
| 2542 | 3046 | 0 |
| 2543 | 3048 | 0 |
| 2544 | 3051 | 0 |
| 2545 | 3052 | 0 |
| 2546 | 3053 | 0 |
| 2547 | 3054 | 0 |
| 2548 | 3055 | 0 |
| 2549 | 3056 | 0 |
| 2550 | 3057 | 0 |
| 2551 | 3058 | 0 |
| 2552 | 3059 | 0 |
| 2553 | 3060 | 0 |
| 2554 | 3061 | 0 |
| 2555 | 3065 | 0 |
| 2556 | 3066 | 0 |
| 2557 | 3067 | 0 |
| 2558 | 3072 | 0 |
| 2559 | 3075 | 0 |
| 2560 | 3077 | 0 |
| 2561 | 3078 | 0 |
| 2562 | 3079 | 0 |
| 2563 | 3080 | 0 |
| 2564 | 3081 | 0 |
| 2565 | 3082 | 0 |
| 2566 | 3083 | 0 |
| 2567 | 3084 | 0 |
| 2568 | 3085 | 0 |
| 2569 | 3086 | 0 |
| 2570 | 3088 | 0 |
| 2571 | 3089 | 0 |
| 2572 | 3090 | 0 |
| 2573 | 3091 | 0 |
| 2574 | 3092 | 0 |
| 2575 | 3093 | 0 |
| 2576 | 3094 | 0 |
| 2577 | 3095 | 0 |
| 2578 | 3096 | 0 |
| 2579 | 3097 | 0 |
| 2580 | 3098 | 0 |
| 2581 | 3099 | 0 |
| 2582 | 3100 | 0 |
| 2583 | 3101 | 0 |
| 2584 | 3102 | 0 |
| 2585 | 3103 | 0 |
| 2586 | 3104 | 0 |
| 2587 | 3105 | 0 |
| 2588 | 3106 | 0 |
| 2589 | 3108 | 0 |
| 2590 | 3109 | 0 |
| 2591 | 3110 | 0 |
| 2592 | 3111 | 0 |
| 2593 | 3112 | 0 |
| 2594 | 3113 | 0 |
| 2595 | 3114 | 0 |
| 2596 | 3115 | 0 |
| 2597 | 3116 | 0 |
| 2598 | 3117 | 0 |
| 2599 | 3118 | 0 |
| 2600 | 3119 | 0 |
| 2601 | 3120 | 0 |
| 2602 | 3121 | 0 |
| 2603 | 3122 | 0 |
| 2604 | 3123 | 0 |
| 2605 | 3124 | 0 |
| 2606 | 3125 | 0 |
| 2607 | 3141 | 0 |
| 2608 | 3142 | 0 |
| 2609 | 3143 | 0 |
| 2610 | 3144 | 0 |
| 2611 | 3145 | 0 |
| 2612 | 3146 | 0 |
| 2613 | 3147 | 0 |
| 2614 | 3148 | 0 |
| 2615 | 3149 | 0 |
| 2616 | 3150 | 0 |
| 2617 | 3151 | 0 |
| 2618 | 3152 | 0 |
| 2619 | 3153 | 0 |
| 2620 | 3154 | 0 |
| 2621 | 3155 | 0 |
| 2622 | 3156 | 0 |
| 2623 | 3157 | 0 |
| 2624 | 3158 | 0 |
| 2625 | 3159 | 0 |
| 2626 | 3160 | 0 |
| 2627 | 3161 | 0 |
| 2628 | 3162 | 0 |
| 2629 | 3163 | 0 |
| 2630 | 3164 | 0 |
| 2631 | 3165 | 0 |
| 2632 | 3183 | 0 |
| 2633 | 3184 | 0 |
| 2634 | 3185 | 0 |
| 2635 | 3186 | 0 |
| 2636 | 3187 | 0 |
| 2637 | 3188 | 0 |
| 2638 | 3189 | 0 |
| 2639 | 3191 | 0 |
| 2640 | 3192 | 0 |
| 2641 | 3193 | 0 |
| 2642 | 3194 | 0 |
| 2643 | 3195 | 0 |
| 2644 | 3196 | 0 |
| 2645 | 3197 | 0 |
| 2646 | 3198 | 0 |
| 2647 | 3199 | 0 |
| 2648 | 3200 | 0 |
| 2649 | 3201 | 0 |
| 2650 | 3202 | 0 |
| 2651 | 3203 | 0 |
| 2652 | 3204 | 0 |
| 2653 | 3205 | 0 |
| 2654 | 3206 | 0 |
| 2655 | 3207 | 0 |
| 2656 | 3208 | 0 |
| 2657 | 3209 | 0 |
| 2658 | 3211 | 0 |
| 2659 | 3212 | 0 |
| 2660 | 3213 | 0 |
| 2661 | 3214 | 0 |
| 2662 | 3232 | 0 |
| 2663 | 3233 | 0 |
| 2664 | 3234 | 0 |
| 2665 | 3235 | 0 |
| 2666 | 3236 | 0 |
| 2667 | 3237 | 0 |
| 2668 | 3238 | 0 |
| 2669 | 3239 | 0 |
| 2670 | 3240 | 0 |
| 2671 | 3242 | 0 |
| 2672 | 3243 | 0 |
| 2673 | 3244 | 0 |
| 2674 | 3245 | 0 |
| 2675 | 3246 | 0 |
| 2676 | 3247 | 0 |
| 2677 | 3248 | 0 |
| 2678 | 3249 | 0 |
| 2679 | 3250 | 0 |
| 2680 | 3251 | 0 |
| 2681 | 3252 | 0 |
| 2682 | 3253 | 0 |
| 2683 | 3254 | 0 |
| 2684 | 3255 | 0 |
| 2685 | 3256 | 0 |
| 2686 | 3257 | 0 |
| 2687 | 3258 | 0 |
| 2688 | 3259 | 0 |
| 2689 | 3260 | 0 |
| 2690 | 3261 | 0 |
| 2691 | 3262 | 0 |
| 2692 | 3263 | 0 |
| 2693 | 3264 | 0 |
| 2694 | 3265 | 0 |
| 2695 | 3266 | 0 |
| 2696 | 3267 | 0 |
| 2697 | 3268 | 0 |
| 2698 | 3269 | 0 |
| 2699 | 3270 | 0 |
| 2700 | 3271 | 0 |
| 2701 | 3272 | 0 |
| 2702 | 3273 | 0 |
| 2703 | 3274 | 0 |
| 2704 | 3275 | 0 |
| 2705 | 3276 | 0 |
| 2706 | 3278 | 0 |
| 2707 | 3279 | 0 |
| 2708 | 3280 | 0 |
| 2709 | 3281 | 0 |
| 2710 | 3282 | 0 |
| 2711 | 3283 | 0 |
| 2712 | 3284 | 0 |
| 2713 | 3285 | 0 |
| 2714 | 3286 | 0 |
| 2715 | 3287 | 0 |
| 2716 | 3288 | 0 |
| 2717 | 3320 | 0 |
| 2718 | 3321 | 0 |
| 2719 | 3322 | 0 |
| 2720 | 3323 | 0 |
| 2721 | 3324 | 0 |
| 2722 | 3325 | 0 |
| 2723 | 3326 | 0 |
| 2724 | 3327 | 0 |
| 2725 | 3335 | 0 |
| 2726 | 3336 | 0 |
| 2727 | 3369 | 0 |
| 2728 | 3370 | 0 |
| 2729 | 3371 | 0 |
| 2730 | 3372 | 0 |
| 2731 | 3373 | 0 |
| 2732 | 3374 | 0 |
| 2733 | 3375 | 0 |
| 2734 | 3376 | 0 |
| 2735 | 3377 | 0 |
| 2736 | 3378 | 0 |
| 2737 | 3379 | 0 |
| 2738 | 3380 | 0 |
| 2739 | 3381 | 0 |
| 2740 | 3382 | 0 |
| 2741 | 3383 | 0 |
| 2742 | 3384 | 0 |
| 2743 | 3385 | 0 |
| 2744 | 3386 | 0 |
| 2745 | 3387 | 0 |
| 2746 | 3388 | 0 |
| 2747 | 3389 | 0 |
| 2748 | 3390 | 0 |
| 2749 | 3391 | 0 |
| 2750 | 3392 | 0 |
| 2751 | 3393 | 0 |
| 2752 | 3394 | 0 |
| 2753 | 3411 | 0 |
| 2754 | 3412 | 0 |
| 2755 | 3413 | 0 |
| 2756 | 3414 | 0 |
| 2757 | 3415 | 0 |
| 2758 | 3416 | 0 |
| 2759 | 3461 | 0 |
| 2760 | 3462 | 0 |
| 2761 | 3463 | 0 |
| 2762 | 3464 | 0 |
| 2763 | 3465 | 0 |
| 2764 | 3466 | 0 |
| 2765 | 3467 | 0 |
| 2766 | 3468 | 0 |
| 2767 | 3469 | 0 |
| 2768 | 3470 | 0 |
| 2769 | 3471 | 0 |
| 2770 | 3472 | 0 |
| 2771 | 3473 | 0 |
| 2772 | 3474 | 0 |
| 2773 | 3475 | 0 |
| 2774 | 3476 | 0 |
| 2775 | 3477 | 0 |
| 2776 | 3478 | 0 |
| 2777 | 3479 | 0 |
| 2778 | 3480 | 0 |
| 2779 | 3481 | 0 |
| 2780 | 3482 | 0 |
| 2781 | 3483 | 0 |
| 2782 | 3484 | 0 |
| 2783 | 3485 | 0 |
| 2784 | 3486 | 0 |
| 2785 | 3487 | 0 |
| 2786 | 3488 | 0 |
| 2787 | 3489 | 0 |
| 2788 | 3490 | 0 |
| 2789 | 3491 | 0 |
| 2790 | 3492 | 0 |
| 2791 | 3493 | 0 |
| 2792 | 3500 | 0 |
| 2793 | 3501 | 0 |
| 2794 | 3502 | 0 |
| 2795 | 3503 | 0 |
| 2796 | 3504 | 0 |
| 2797 | 3505 | 0 |
| 2798 | 3506 | 0 |
| 2799 | 3507 | 0 |
| 2800 | 3508 | 0 |
| 2801 | 3509 | 0 |
| 2802 | 3510 | 0 |
| 2803 | 3511 | 0 |
| 2804 | 3512 | 0 |
| 2805 | 3513 | 0 |
| 2806 | 3514 | 0 |
| 2807 | 3515 | 0 |
| 2808 | 3516 | 0 |
| 2809 | 3517 | 0 |
| 2810 | 3518 | 0 |
| 2811 | 3519 | 0 |
| 2812 | 3521 | 0 |
| 2813 | 3522 | 0 |
| 2814 | 3523 | 0 |
| 2815 | 3524 | 0 |
| 2816 | 3525 | 0 |
| 2817 | 3526 | 0 |
| 2818 | 3527 | 0 |
| 2819 | 3528 | 0 |
| 2820 | 3529 | 0 |
| 2821 | 3530 | 0 |
| 2822 | 3531 | 0 |
| 2823 | 3532 | 0 |
| 2824 | 3533 | 0 |
| 2825 | 3534 | 0 |
| 2826 | 3535 | 0 |
| 2827 | 3536 | 0 |
| 2828 | 3537 | 0 |
| 2829 | 3538 | 0 |
| 2830 | 3539 | 0 |
| 2831 | 3540 | 0 |
| 2832 | 3541 | 0 |
| 2833 | 3542 | 0 |
| 2834 | 3543 | 0 |
| 2835 | 3544 | 0 |
| 2836 | 3545 | 0 |
| 2837 | 3546 | 0 |
| 2838 | 3547 | 0 |
| 2839 | 3548 | 0 |
| 2840 | 3549 | 0 |
| 2841 | 3550 | 0 |
| 2842 | 3555 | 0 |
| 2843 | 3556 | 0 |
| 2844 | 3557 | 0 |
| 2845 | 3558 | 0 |
| 2846 | 3559 | 0 |
| 2847 | 3560 | 0 |
| 2848 | 3561 | 0 |
| 2849 | 3562 | 0 |
| 2850 | 3563 | 0 |
| 2851 | 3564 | 0 |
| 2852 | 3565 | 0 |
| 2853 | 3566 | 0 |
| 2854 | 3567 | 0 |
| 2855 | 3568 | 0 |
| 2856 | 3569 | 0 |
| 2857 | 3570 | 0 |
| 2858 | 3571 | 0 |
| 2859 | 3572 | 0 |
| 2860 | 3573 | 0 |
| 2861 | 3574 | 0 |
| 2862 | 3575 | 0 |
| 2863 | 3576 | 0 |
| 2864 | 3577 | 0 |
| 2865 | 3578 | 0 |
| 2866 | 3579 | 0 |
| 2867 | 3580 | 0 |
| 2868 | 3581 | 0 |
| 2869 | 3582 | 0 |
| 2870 | 3583 | 0 |
| 2871 | 3584 | 0 |
| 2872 | 3585 | 0 |
| 2873 | 3586 | 0 |
| 2874 | 3587 | 0 |
| 2875 | 3588 | 0 |
| 2876 | 3589 | 0 |
| 2877 | 3590 | 0 |
| 2878 | 3591 | 0 |
| 2879 | 3592 | 0 |
| 2880 | 3593 | 0 |
| 2881 | 3594 | 0 |
| 2882 | 3596 | 0 |
| 2883 | 3597 | 0 |
| 2884 | 3598 | 0 |
| 2885 | 3599 | 0 |
| 2886 | 3600 | 0 |
| 2887 | 3601 | 0 |
| 2888 | 3602 | 0 |
| 2889 | 3603 | 0 |
| 2890 | 3604 | 0 |
| 2891 | 3605 | 0 |
| 2892 | 3606 | 0 |
| 2893 | 3607 | 0 |
| 2894 | 3608 | 0 |
| 2895 | 3609 | 0 |
| 2896 | 3610 | 0 |
| 2897 | 3611 | 0 |
| 2898 | 3612 | 0 |
| 2899 | 3613 | 0 |
| 2900 | 3614 | 0 |
| 2901 | 3615 | 0 |
| 2902 | 3616 | 0 |
| 2903 | 3617 | 0 |
| 2904 | 3618 | 0 |
| 2905 | 3619 | 0 |
| 2906 | 3620 | 0 |
| 2907 | 3621 | 0 |
| 2908 | 3622 | 0 |
| 2909 | 3624 | 0 |
| 2910 | 3625 | 0 |
| 2911 | 3626 | 0 |
| 2912 | 3627 | 0 |
| 2913 | 3628 | 0 |
| 2914 | 3629 | 0 |
| 2915 | 3630 | 0 |
| 2916 | 3631 | 0 |
| 2917 | 3632 | 0 |
| 2918 | 3633 | 0 |
| 2919 | 3634 | 0 |
| 2920 | 3635 | 0 |
| 2921 | 3636 | 0 |
| 2922 | 3637 | 0 |
| 2923 | 3638 | 0 |
| 2924 | 3639 | 0 |
| 2925 | 3640 | 0 |
| 2926 | 3641 | 0 |
| 2927 | 3642 | 0 |
| 2928 | 3643 | 0 |
| 2929 | 3644 | 0 |
| 2930 | 3645 | 0 |
| 2931 | 3646 | 0 |
| 2932 | 3647 | 0 |
| 2933 | 3648 | 0 |
| 2934 | 3649 | 0 |
| 2935 | 3650 | 0 |
| 2936 | 3651 | 0 |
| 2937 | 3652 | 0 |
| 2938 | 3653 | 0 |
| 2939 | 3655 | 0 |
| 2940 | 3656 | 0 |
| 2941 | 3657 | 0 |
| 2942 | 3658 | 0 |
| 2943 | 3659 | 0 |
| 2944 | 3660 | 0 |
| 2945 | 3661 | 0 |
| 2946 | 3662 | 0 |
| 2947 | 3663 | 0 |
| 2948 | 3682 | 0 |
| 2949 | 3683 | 0 |
| 2950 | 3684 | 0 |
| 2951 | 3685 | 0 |
| 2952 | 3686 | 0 |
| 2953 | 3687 | 0 |
| 2954 | 3688 | 0 |
| 2955 | 3689 | 0 |
| 2956 | 3690 | 0 |
| 2957 | 3691 | 0 |
| 2958 | 3692 | 0 |
| 2959 | 3693 | 0 |
| 2960 | 3694 | 0 |
| 2961 | 3695 | 0 |
| 2962 | 3696 | 0 |
| 2963 | 3697 | 0 |
| 2964 | 3698 | 0 |
| 2965 | 3699 | 0 |
| 2966 | 3700 | 0 |
| 2967 | 3701 | 0 |
| 2968 | 3702 | 0 |
| 2969 | 3703 | 0 |
| 2970 | 3704 | 0 |
| 2971 | 3705 | 0 |
| 2972 | 3706 | 0 |
| 2973 | 3707 | 0 |
| 2974 | 3708 | 0 |
| 2975 | 3725 | 0 |
| 2976 | 3726 | 0 |
| 2977 | 3727 | 0 |
| 2978 | 3728 | 0 |
| 2979 | 3729 | 0 |
| 2980 | 3730 | 0 |
| 2981 | 3731 | 0 |
| 2982 | 3732 | 0 |
| 2983 | 3733 | 0 |
| 2984 | 3734 | 0 |
| 2985 | 3735 | 0 |
| 2986 | 3753 | 0 |
| 2987 | 3754 | 0 |
| 2988 | 3755 | 0 |
| 2989 | 3756 | 0 |
| 2990 | 3757 | 0 |
| 2991 | 3758 | 0 |
| 2992 | 3759 | 0 |
| 2993 | 3760 | 0 |
| 2994 | 3761 | 0 |
| 2995 | 3762 | 0 |
| 2996 | 3763 | 0 |
| 2997 | 3764 | 0 |
| 2998 | 3765 | 0 |
| 2999 | 3766 | 0 |
| 3000 | 3767 | 0 |
| 3001 | 3768 | 0 |
| 3002 | 3769 | 0 |
| 3003 | 3770 | 0 |
| 3004 | 3771 | 0 |
| 3005 | 3772 | 0 |
| 3006 | 3773 | 0 |
| 3007 | 3774 | 0 |
| 3008 | 3775 | 0 |
| 3009 | 3776 | 0 |
| 3010 | 3777 | 0 |
| 3011 | 3778 | 0 |
| 3012 | 3779 | 0 |
| 3013 | 3780 | 0 |
| 3014 | 3781 | 0 |
| 3015 | 3782 | 0 |
| 3016 | 3783 | 0 |
| 3017 | 3784 | 0 |
| 3018 | 3785 | 0 |
| 3019 | 3786 | 0 |
| 3020 | 3787 | 0 |
| 3021 | 3788 | 0 |
| 3022 | 3789 | 0 |
| 3023 | 3790 | 0 |
| 3024 | 3791 | 0 |
| 3025 | 3792 | 0 |
| 3026 | 3793 | 0 |
| 3027 | 3794 | 0 |
| 3028 | 3795 | 0 |
| 3029 | 3796 | 0 |
| 3030 | 3797 | 0 |
| 3031 | 3798 | 0 |
| 3032 | 3799 | 0 |
| 3033 | 3815 | 0 |
| 3034 | 3816 | 0 |
| 3035 | 3817 | 0 |
| 3036 | 3818 | 0 |
| 3037 | 3819 | 0 |
| 3038 | 3820 | 0 |
| 3039 | 3821 | 0 |
| 3040 | 3822 | 0 |
| 3041 | 3823 | 0 |
| 3042 | 3824 | 0 |
| 3043 | 3825 | 0 |
| 3044 | 3826 | 0 |
| 3045 | 3827 | 0 |
| 3046 | 3828 | 0 |
| 3047 | 3829 | 0 |
| 3048 | 3830 | 0 |
| 3049 | 3831 | 0 |
| 3050 | 3832 | 0 |
| 3051 | 3833 | 0 |
| 3052 | 3834 | 0 |
| 3053 | 3835 | 0 |
| 3054 | 3836 | 0 |
| 3055 | 3837 | 0 |
| 3056 | 3838 | 0 |
| 3057 | 3839 | 0 |
| 3058 | 3840 | 0 |
| 3059 | 3841 | 0 |
| 3060 | 3842 | 0 |
| 3061 | 3843 | 0 |
| 3062 | 3844 | 0 |
| 3063 | 3845 | 0 |
| 3064 | 3846 | 0 |
| 3065 | 3848 | 0 |
| 3066 | 3849 | 0 |
| 3067 | 3850 | 0 |
| 3068 | 3851 | 0 |
| 3069 | 3852 | 0 |
| 3070 | 3853 | 0 |
| 3071 | 3854 | 0 |
| 3072 | 3855 | 0 |
| 3073 | 3856 | 0 |
| 3074 | 3857 | 0 |
| 3075 | 3858 | 0 |
| 3076 | 3859 | 0 |
| 3077 | 3860 | 0 |
| 3078 | 3861 | 0 |
| 3079 | 3862 | 0 |
| 3080 | 3863 | 0 |
| 3081 | 3864 | 0 |
| 3082 | 3865 | 0 |
| 3083 | 3866 | 0 |
| 3084 | 3867 | 0 |
| 3085 | 3868 | 0 |
| 3086 | 3869 | 0 |
| 3087 | 3870 | 0 |
| 3088 | 3871 | 0 |
| 3089 | 3872 | 0 |
| 3090 | 3873 | 0 |
| 3091 | 3874 | 0 |
| 3092 | 3875 | 0 |
| 3093 | 3877 | 0 |
| 3094 | 3878 | 0 |
| 3095 | 3879 | 0 |
| 3096 | 3880 | 0 |
| 3097 | 3881 | 0 |
| 3098 | 3882 | 0 |
| 3099 | 3883 | 0 |
| 3100 | 3884 | 0 |
| 3101 | 3885 | 0 |
| 3102 | 3886 | 0 |
| 3103 | 3887 | 0 |
| 3104 | 3888 | 0 |
| 3105 | 3889 | 0 |
| 3106 | 3890 | 0 |
| 3107 | 3891 | 0 |
| 3108 | 3892 | 0 |
| 3109 | 3893 | 0 |
| 3110 | 3894 | 0 |
| 3111 | 3895 | 0 |
| 3112 | 3896 | 0 |
| 3113 | 3897 | 0 |
| 3114 | 3898 | 0 |
| 3115 | 3899 | 0 |
| 3116 | 3900 | 0 |
| 3117 | 3901 | 0 |
| 3118 | 3902 | 0 |
| 3119 | 3903 | 0 |
| 3120 | 3904 | 0 |
| 3121 | 3905 | 0 |
| 3122 | 3906 | 0 |
| 3123 | 3907 | 0 |
| 3124 | 3909 | 0 |
| 3125 | 3910 | 0 |
| 3126 | 3911 | 0 |
| 3127 | 3912 | 0 |
| 3128 | 3913 | 0 |
| 3129 | 3914 | 0 |
| 3130 | 3934 | 0 |
| 3131 | 3935 | 0 |
| 3132 | 3937 | 0 |
| 3133 | 3970 | 0 |
| 3134 | 3971 | 0 |
| 3135 | 3972 | 0 |
| 3136 | 3973 | 0 |
| 3137 | 3975 | 0 |
| 3138 | 3976 | 0 |
| 3139 | 3977 | 0 |
| 3140 | 3979 | 0 |
| 3141 | 3980 | 0 |
| 3142 | 3981 | 0 |
| 3143 | 3982 | 0 |
| 3144 | 3995 | 0 |
| 3145 | 3996 | 0 |
| 3146 | 3997 | 0 |
| 3147 | 3998 | 0 |
| 3148 | 3999 | 0 |
| 3149 | 4000 | 0 |
| 3150 | 4001 | 0 |
| 3151 | 4002 | 0 |
| 3152 | 4003 | 0 |
| 3153 | 4004 | 0 |
| 3154 | 4005 | 0 |
| 3155 | 4006 | 0 |
| 3156 | 4007 | 0 |
| 3157 | 4008 | 0 |
| 3158 | 4009 | 0 |
| 3159 | 4010 | 0 |
| 3160 | 4011 | 0 |
| 3161 | 4012 | 0 |
| 3162 | 4013 | 0 |
| 3163 | 4014 | 0 |
| 3164 | 4015 | 0 |
| 3165 | 4016 | 0 |
| 3166 | 4017 | 0 |
| 3167 | 4018 | 0 |
| 3168 | 4019 | 0 |
| 3169 | 4020 | 0 |
| 3170 | 4021 | 0 |
| 3171 | 4022 | 0 |
| 3172 | 4023 | 0 |
| 3173 | 4024 | 0 |
| 3174 | 4025 | 0 |
| 3175 | 4026 | 0 |
| 3176 | 4027 | 0 |
| 3177 | 4028 | 0 |
| 3178 | 4029 | 0 |
| 3179 | 4030 | 0 |
| 3180 | 4031 | 0 |
| 3181 | 4032 | 0 |
| 3182 | 4033 | 0 |
| 3183 | 4034 | 0 |
| 3184 | 4035 | 0 |
| 3185 | 4036 | 0 |
| 3186 | 4037 | 0 |
| 3187 | 4038 | 0 |
| 3188 | 4039 | 0 |
| 3189 | 4040 | 0 |
| 3190 | 4041 | 0 |
| 3191 | 4042 | 0 |
| 3192 | 4043 | 0 |
| 3193 | 4044 | 0 |
| 3194 | 4045 | 0 |
| 3195 | 4046 | 0 |
| 3196 | 4047 | 0 |
| 3197 | 4048 | 0 |
| 3198 | 4049 | 0 |
| 3199 | 4050 | 0 |
| 3200 | 4051 | 0 |
| 3201 | 4052 | 0 |
| 3202 | 4053 | 0 |
| 3203 | 4054 | 0 |
| 3204 | 4055 | 0 |
| 3205 | 4056 | 0 |
| 3206 | 4057 | 0 |
| 3207 | 4059 | 0 |
| 3208 | 4060 | 0 |
| 3209 | 4061 | 0 |
| 3210 | 4062 | 0 |
| 3211 | 4063 | 0 |
| 3212 | 4064 | 0 |
| 3213 | 4065 | 0 |
| 3214 | 4066 | 0 |
| 3215 | 4067 | 0 |
| 3216 | 4068 | 0 |
| 3217 | 4069 | 0 |
| 3218 | 4070 | 0 |
| 3219 | 4071 | 0 |
| 3220 | 4072 | 0 |
| 3221 | 4073 | 0 |
| 3222 | 4074 | 0 |
| 3223 | 4075 | 0 |
| 3224 | 4076 | 0 |
| 3225 | 4077 | 0 |
| 3226 | 4078 | 0 |
| 3227 | 4079 | 0 |
| 3228 | 4080 | 0 |
| 3229 | 4081 | 0 |
| 3230 | 4082 | 0 |
| 3231 | 4083 | 0 |
| 3232 | 4084 | 0 |
| 3233 | 4085 | 0 |
| 3234 | 4086 | 0 |
| 3235 | 4087 | 0 |
| 3236 | 4088 | 0 |
| 3237 | 4089 | 0 |
| 3238 | 4090 | 0 |
| 3239 | 4091 | 0 |
| 3240 | 4092 | 0 |
| 3241 | 4094 | 0 |
| 3242 | 4095 | 0 |
| 3243 | 4096 | 0 |
| 3244 | 4097 | 0 |
| 3245 | 4098 | 0 |
| 3246 | 4099 | 0 |
| 3247 | 4100 | 0 |
| 3248 | 4101 | 0 |
| 3249 | 4103 | 0 |
| 3250 | 4104 | 0 |
| 3251 | 4105 | 0 |
| 3252 | 4106 | 0 |
| 3253 | 4107 | 0 |
| 3254 | 4108 | 0 |
| 3255 | 4109 | 0 |
| 3256 | 4110 | 0 |
| 3257 | 4111 | 0 |
| 3258 | 4112 | 0 |
| 3259 | 4113 | 0 |
| 3260 | 4114 | 0 |
| 3261 | 4115 | 0 |
| 3262 | 4116 | 0 |
| 3263 | 4117 | 0 |
| 3264 | 4118 | 0 |
| 3265 | 4119 | 0 |
| 3266 | 4121 | 0 |
| 3267 | 4122 | 0 |
| 3268 | 4124 | 0 |
| 3269 | 4125 | 0 |
| 3270 | 4126 | 0 |
| 3271 | 4127 | 0 |
| 3272 | 4128 | 0 |
| 3273 | 4129 | 0 |
| 3274 | 4130 | 0 |
| 3275 | 4131 | 0 |
| 3276 | 4132 | 0 |
| 3277 | 4133 | 0 |
| 3278 | 4134 | 0 |
| 3279 | 4135 | 0 |
| 3280 | 4136 | 0 |
| 3281 | 4137 | 0 |
| 3282 | 4138 | 0 |
| 3283 | 4139 | 0 |
| 3284 | 4140 | 0 |
| 3285 | 4141 | 0 |
| 3286 | 4142 | 0 |
| 3287 | 4143 | 0 |
| 3288 | 4144 | 0 |
| 3289 | 4145 | 0 |
| 3290 | 4146 | 0 |
| 3291 | 4147 | 0 |
| 3292 | 4148 | 0 |
| 3293 | 4149 | 0 |
| 3294 | 4150 | 0 |
| 3295 | 4151 | 0 |
| 3296 | 4152 | 0 |
| 3297 | 4153 | 0 |
| 3298 | 4154 | 0 |
| 3299 | 4155 | 0 |
| 3300 | 4156 | 0 |
| 3301 | 4157 | 0 |
| 3302 | 4158 | 0 |
| 3303 | 4159 | 0 |
| 3304 | 4177 | 0 |
| 3305 | 4178 | 0 |
| 3306 | 4179 | 0 |
| 3307 | 4180 | 0 |
| 3308 | 4181 | 0 |
| 3309 | 4182 | 0 |
| 3310 | 4184 | 0 |
| 3311 | 4185 | 0 |
| 3312 | 4186 | 0 |
| 3313 | 4187 | 0 |
| 3314 | 4188 | 0 |
| 3315 | 4204 | 0 |
| 3316 | 4205 | 0 |
| 3317 | 4206 | 0 |
| 3318 | 4207 | 0 |
| 3319 | 4208 | 0 |
| 3320 | 4209 | 0 |
| 3321 | 4210 | 0 |
| 3322 | 4211 | 0 |
| 3323 | 4212 | 0 |
| 3324 | 4213 | 0 |
| 3325 | 4214 | 0 |
| 3326 | 4215 | 0 |
| 3327 | 4216 | 0 |
| 3328 | 4217 | 0 |
| 3329 | 4218 | 0 |
| 3330 | 4219 | 0 |
| 3331 | 4220 | 0 |
| 3332 | 4221 | 0 |
| 3333 | 4222 | 0 |
| 3334 | 4223 | 0 |
| 3335 | 4224 | 0 |
| 3336 | 4225 | 0 |
| 3337 | 4226 | 0 |
| 3338 | 4227 | 0 |
| 3339 | 4228 | 0 |
| 3340 | 4229 | 0 |
| 3341 | 4230 | 0 |
| 3342 | 4231 | 0 |
| 3343 | 4232 | 0 |
| 3344 | 4233 | 0 |
| 3345 | 4234 | 0 |
| 3346 | 4235 | 0 |
| 3347 | 4236 | 0 |
| 3348 | 4237 | 0 |
| 3349 | 4238 | 0 |
| 3350 | 4239 | 0 |
| 3351 | 4240 | 0 |
| 3352 | 4241 | 0 |
| 3353 | 4242 | 0 |
| 3354 | 4244 | 0 |
| 3355 | 4245 | 0 |
| 3356 | 4249 | 0 |
| 3357 | 4254 | 0 |
| 3358 | 4255 | 0 |
| 3359 | 4256 | 0 |
| 3360 | 4257 | 0 |
| 3361 | 4258 | 0 |
| 3362 | 4259 | 0 |
| 3363 | 4260 | 0 |
| 3364 | 4261 | 0 |
| 3365 | 4262 | 0 |
| 3366 | 4263 | 0 |
| 3367 | 4264 | 0 |
| 3368 | 4265 | 0 |
| 3369 | 4266 | 0 |
| 3370 | 4267 | 0 |
| 3371 | 4268 | 0 |
| 3372 | 4269 | 0 |
| 3373 | 4270 | 0 |
| 3374 | 4271 | 0 |
| 3375 | 4272 | 0 |
| 3376 | 4273 | 0 |
| 3377 | 4274 | 0 |
| 3378 | 4275 | 0 |
| 3379 | 4276 | 0 |
| 3380 | 4277 | 0 |
| 3381 | 4278 | 0 |
| 3382 | 4279 | 0 |
| 3383 | 4280 | 0 |
| 3384 | 4281 | 0 |
| 3385 | 1248 | 0 |
| 3386 | 1249 | 0 |
| 3387 | 1503 | 0 |
| 3388 | 1504 | 0 |
| 3389 | 1505 | 0 |
| 3390 | 1506 | 0 |
| 3391 | 1511 | 0 |
| 3392 | 1512 | 0 |
| 3393 | 1530 | 0 |
| 3394 | 2629 | 0 |
| 3395 | 3126 | 0 |
| 3396 | 3127 | 0 |
| 3397 | 3128 | 0 |
| 3398 | 3129 | 0 |
| 3399 | 3130 | 0 |
| 3400 | 3131 | 0 |
| 3401 | 3132 | 0 |
| 3402 | 3171 | 0 |
| 3403 | 3172 | 0 |
| 3404 | 3173 | 0 |
| 3405 | 3174 | 0 |
| 3406 | 3175 | 0 |
| 3407 | 3182 | 0 |
| 3408 | 3664 | 0 |
| 3409 | 3665 | 0 |
| 3410 | 374 | 0 |
| 3411 | 661 | 0 |
| 3412 | 765 | 0 |
| 3413 | 837 | 0 |
| 3414 | 979 | 0 |
| 3415 | 1347 | 0 |
| 3416 | 1629 | 0 |
| 3417 | 2879 | 0 |
| 3418 | 3008 | 0 |
| 3419 | 3168 | 0 |
| 3420 | 661 | 0 |
| 3421 | 666 | 0 |
| 3422 | 1347 | 0 |
| 3423 | 1349 | 0 |
| 3424 | 1352 | 0 |
| 3425 | 1354 | 0 |
| 3426 | 1746 | 0 |
| 3427 | 1751 | 0 |
| 3428 | 1755 | 0 |
| 3429 | 1793 | 0 |
| 3430 | 1799 | 0 |
| 3431 | 1803 | 0 |
| 3432 | 1807 | 0 |
| 3433 | 1809 | 0 |
| 3434 | 3112 | 0 |
| 3435 | 3114 | 0 |
| 3436 | 3125 | 0 |
| 3437 | 3127 | 0 |
| 3438 | 3162 | 0 |
| 3439 | 3171 | 0 |
| 3440 | 3133 | 0 |
| 3441 | 3134 | 0 |
| 3442 | 3135 | 0 |
| 3443 | 3136 | 0 |
| 3444 | 3137 | 0 |
| 3445 | 3138 | 0 |
| 3446 | 3139 | 0 |
| 3447 | 3140 | 0 |
| 3448 | 3166 | 0 |
| 3449 | 3167 | 0 |
| 3450 | 3169 | 0 |
| 3451 | 3170 | 0 |
| 3452 | 661 | 0 |
| 3453 | 666 | 0 |
| 3454 | 1347 | 0 |
| 3455 | 1349 | 0 |
| 3456 | 1352 | 0 |
| 3457 | 1354 | 0 |
| 3458 | 1746 | 0 |
| 3459 | 1751 | 0 |
| 3460 | 1755 | 0 |
| 3461 | 1793 | 0 |
| 3462 | 1799 | 0 |
| 3463 | 1803 | 0 |
| 3464 | 1807 | 0 |
| 3465 | 1809 | 0 |
| 3466 | 3112 | 0 |
| 3467 | 3114 | 0 |
| 3468 | 3125 | 0 |
| 3469 | 3127 | 0 |
| 3470 | 3162 | 0 |
| 3471 | 3171 | 0 |
| 3472 | 661 | 0 |
| 3473 | 666 | 0 |
| 3474 | 1347 | 0 |
| 3475 | 1349 | 0 |
| 3476 | 1352 | 0 |
| 3477 | 1354 | 0 |
| 3478 | 1746 | 0 |
| 3479 | 1751 | 0 |
| 3480 | 1755 | 0 |
| 3481 | 1793 | 0 |
| 3482 | 1799 | 0 |
| 3483 | 1803 | 0 |
| 3484 | 1807 | 0 |
| 3485 | 1809 | 0 |
| 3486 | 3112 | 0 |
| 3487 | 3114 | 0 |
| 3488 | 3125 | 0 |
| 3489 | 3127 | 0 |
| 3490 | 3162 | 0 |
| 3491 | 3171 | 0 |
| 3492 | 661 | 0 |
| 3493 | 666 | 0 |
| 3494 | 1347 | 0 |
| 3495 | 1349 | 0 |
| 3496 | 1352 | 0 |
| 3497 | 1354 | 0 |
| 3498 | 1746 | 0 |
| 3499 | 1751 | 0 |
| 3500 | 1755 | 0 |
| 3501 | 1793 | 0 |
| 3502 | 1799 | 0 |
| 3503 | 1803 | 0 |
| 3504 | 1807 | 0 |
| 3505 | 1809 | 0 |
| 3506 | 3112 | 0 |
| 3507 | 3114 | 0 |
| 3508 | 3125 | 0 |
| 3509 | 3127 | 0 |
| 3510 | 3162 | 0 |
| 3511 | 3171 | 0 |
| 3512 | 661 | 4 |
| 3513 | 661 | 10 |
| 3514 | 979 | 4 |
| 3515 | 979 | 18 |
| 3516 | 661 | 4 |
| 3517 | 1349 | 4 |
| 3518 | 1352 | 4 |
| 3519 | 1746 | 4 |
| 3520 | 1755 | 4 |
| 3521 | 1803 | 4 |
| 3522 | 1807 | 4 |
| 3523 | 3127 | 4 |
| 3524 | 3162 | 4 |
| 3525 | 3171 | 4 |

[0460] For select ASOs, the degree of KCNT1 mRNA knock-down was determined using a taqman quantitative polymerase chain reaction (qPCR assay). Human (BE(2)-M17) or mouse (Neuro2a) neuronal cell lines were grown in 96 well plates and transfected with either 30 nM or 300 nM ASO using RNAiMAX transfection reagent (ThermoFisher Scientific). After 48 hour incubation at 37° C., cDNA was prepared from each well using the Cell-to-Ct Kit (ThermoFisher Scientific). The expression level of KCNT1 was determined using taqman qPCR assays for either KCNT1 (human Hs01063050_m1 or mouse Mm01330638_g1) or the housekeeping gene HPRT1 (human Hs02800695_m1 or mouse Mm00446968_m1). All taqman assays were predesigned by ThermoFisher Scientific. Human KCNT1 and HPRT1 detection were multiplexed in a single well. Mouse KCNT1 and HPRT1 detection were singleplexed in paired wells. The fold change in KCNT1 was calculated using the ΔΔCp method whereby the expression of KCNT1 is first normalized to HPRT1 (2^{-(Cp_KCNT1-Cp_HPRT1)}) in the same well followed by a secondary normalization to the vehicle, non-non-transfected control (2^{-(Cp_ASO-Cp_vehicle)}). The assay was performed in biological duplicates and technical triplicates. Table 3 lists the percent knock down of KCNT1 expressed in human (BE(2)-M17) or mouse (Neuro2a) cells.

[0461] Sequences with high homology to human KCNT1 and lower homology to cyno and mouse KCNT1 were identified. The ASO sequences, positions in the specified human transcript, and number of mismatches are shown in Table 7 of U.S. Provisional Application 62/862,328 and Table 11 of U.S. Provisional Application 62/884,567 filed Aug. 8, 2019, hereby incorporated by reference in its entirety. MM indicates the number of mismatches.

[0462] For the ASO sequences, homology to non-KCNT1 spliced (secondary) mRNA transcripts were also determined using the NCBI RefSeq R92 (January 2019) and Ensemble R94 (October 2018) databases. Table 8 of U.S. Provisional Application 62/862,328, and Table 12 of U.S. Provisional Application 62/884,567 list the number of non-KCNT1 transcripts identified with increasing number of mismatches from 0MM to 4MM.

[0463] For the ASO sequences, homology to non-KCNT1 non-spliced (primary) pre-mRNA transcripts were also determined using the Ensemble R94 (October 2018) databases. Table 9 of U.S. Provisional Application 62/862,328 and Table 13 of U.S. Provisional Application 62/884,567 list the number of non-KCNT1 transcripts identified with increasing number of mismatches from 0MM to 4MM.

[0464] For the ASO sequences, the position of reported single nucleotide polymorphisms (SNPs) within the ASO sequence were also determined using the NCBI dbSNP Build 151 (October 2017, downloaded January 2019). Table 10 of U.S. Provisional Application 62/862,328 and Table 14 of U.S. Provisional Application 62/884,567 list the position of each SNP and the associated SNP ID.

[0465] For the ASO sequences, the level of KCNT1 knock-down were also determined using human (BE(2)-M17) or mouse (Neuro2a) neuronal cell lines. Table 4 lists the data expressed as percent knock-down.

TABLE 3
Exemplary ASOs - Percent Knock down of KCNT1 expressed
in human (BE(2)-M17) or mouse (Neuro2a) cells

| | BE(2)-M17 | BE(2)-M17 | Neuro2a | Neuro2a |
|---|---|---|---|---|
| SEQ | 3 nM ASO | 30 nM ASO | 3 nM ASO | 30 nM ASO |
| ID NO: | Mean | Mean | Mean | Mean |
| 1 | 4 | 25 | 3 | 35 |
| 4 | 7 | 50 | 24 | 62 |
| 5 | 7 | 47 | 19 | 57 |
| 6 | 20 | 53 | 5 | 62 |
| 7 | 3 | 41 | 14 | 56 |
| 8 | 15 | 43 | 9 | 53 |
| 10 | 23 | 45 | 27 | 61 |
| 12 | 9 | 49 | 12 | 54 |
| 13 | −1 | 25 | −16 | 8 |
| 15 | 6 | 37 | −2 | 37 |

TABLE 4
Exemplary ASOs - Percent Knock down of KCNT1 expressed in
human (BE(2)-M17) or mouse (Neuro2a) cells

| | Neuro2a | BE(2)-M17 |
|---|---|---|
| | 30 nM ASO | 30 nM ASO |
| SEQ ID NO: | Mean | Mean |
| 1 | 34.5 | |
| 4 | 69.5 | |
| 5 | 68 | 28 |
| 6 | 75 | |
| 7 | 61 | 28.5 |
| 8 | 61.5 | |
| 9 | 38.5 | |
| 10 | 69 | |
| 12 | 64 | |
| 13 | 8 | |
| 14 | 41 | |
| 15 | 50 | |
| 25 | 46 | |
| 26 | 43 | |
| 28 | 70.5 | |
| 35 | 45.5 | |
| 38 | 67 | |
| 50 | 28.5 | |
| 77 | 67.5 | |
| 80 | 47.5 | |
| 584 | 22.5 | |
| 587 | 5 | |
| 588 | 52.5 | |
| 672 | 23 | |
| 675 | 47 | |
| 751 | 69 | 33 |
| 753 | 34 | |
| 756 | 39.5 | |
| 758 | 70.5 | |
| 759 | 76 | 43 |
| 988 | 77.5 | |
| 1017 | 49.5 | |
| 1018 | 53.5 | |
| 1019 | 58 | |
| 1021 | 50 | |
| 1028 | 57 | |
| 1045 | 58 | |
| 1046 | 67.5 | 29 |
| 1047 | 66.5 | 27 |
| 1071 | 73.5 | 48 |
| 1100 | 44.5 | |
| 1130 | 6 | |
| 1131 | 19.5 | |
| 1132 | 39 | |
| 1133 | 21 | |
| 1134 | 4 | |
| 1145 | 31.5 | |
| 1146 | 24 | |
| 1154 | 65.5 | |
| 1201 | 66 | |
| 1202 | 65.5 | |
| 1203 | 71.5 | |
| 1205 | 60 | |
| 1206 | 75 | 32.5 |
| 1207 | 59 | |
| 1208 | 66.5 | |
| 1209 | 66 | |
| 1210 | 54.5 | |
| 1243 | 59 | |
| 1253 | 35 | |
| 1255 | 25 | |
| 1302 | 58.5 | |
| 1303 | 52.5 | |
| 1304 | 37.5 | |
| 1335 | 80.5 | 48.5 |
| 1337 | 70 | |
| 1338 | 46 | |
| 1339 | 20.5 | |
| 1364 | 22.5 | |
| 1368 | 15.5 | |
| 1388 | 77 | 39 |
| 1392 | 72.5 | |
| 1402 | 67 | |
| 1416 | 59.5 | |
| 1473 | 46 | |
| 1502 | 71 | 30.5 |
| 1504 | 74.5 | |
| 1505 | 72 | |
| 1507 | 75 | |
| 1510 | 78 | |
| 1538 | 31.5 | |
| 1541 | 49 | |
| 1542 | 61 | |
| 1543 | 68.5 | |
| 1544 | 62 | |
| 1546 | 76.5 | 53.5 |
| 1548 | 69 | |
| 1551 | 81.5 | 41 |
| 1554 | 69.5 | |
| 1555 | 75.5 | 37 |
| 1556 | 76.5 | |
| 1558 | 76.5 | |
| 1559 | 89.5 | 41.5 |
| 1560 | 80.5 | |
| 1561 | 73.5 | |
| 1562 | 52 | |
| 1563 | 48 | |
| 1564 | 35.5 | |
| 1565 | 61.5 | |
| 1566 | 51.5 | |
| 1570 | 50.5 | |
| 1573 | 27.5 | |
| 1574 | 58.5 | |
| 1601 | 59.5 | |
| 1602 | 55 | |
| 1968 | 37 | |
| 1973 | 38 | |
| 1974 | 30.5 | |
| 1975 | 35 | |
| 1976 | 33 | |
| 1977 | 34.5 | |
| 2002 | 41.5 | |
| 2044 | 66.5 | |
| 2046 | 60 | |
| 2050 | 72 | |
| 2052 | 76.5 | |
| 2053 | 71 | |
| 2054 | 74.5 | |
| 2055 | 72.5 | |
| 2236 | 29 | |
| 2294 | 51 | |
| 2303 | 57 | |
| 2304 | 54 | |
| 2305 | 53 | |
| 2307 | 3.5 | |
| 2310 | 56.5 | |
| 2311 | 50 | |
| 2319 | 26 | |
| 2320 | 24 | |
| 2324 | 44.5 | |
| 2327 | 64 | |
| 2329 | 39 | |
| 2346 | 61 | |
| 2367 | 28 | |
| 2375 | 69 | |
| 2377 | 60.5 | |
| 2378 | 66.5 | |
| 2379 | 67.5 | |
| 2382 | 79.5 | |
| 2383 | 70.5 | |
| 2384 | 66 | |
| 2392 | 71 | |
| 2393 | 67 | |
| 2394 | 64.5 | |
| 2505 | 9.5 | |
| 2525 | 54 | |
| 2529 | 54 | |
| 2530 | 80 | 15 |
| 2533 | 66.5 | 7 |
| 2534 | 49.5 | |
| 2592 | 32 | |
| 2593 | 52.5 | |
| 2594 | 30.5 | |
| 2595 | 67.5 | 29.5 |
| 2596 | 64.5 | 29 |
| 2597 | 54 | |
| 2598 | 52.5 | |
| 2606 | 74.5 | |
| 2628 | 54 | |
| 2679 | 64.5 | |
| 2680 | 63 | |
| 2681 | 65 | 39.5 |
| 2784 | 39.5 | |
| 2813 | 47 | |
| 2901 | 40.5 | |
| 2902 | 34.5 | |
| 2903 | 36.5 | |
| 2947 | 44 | |
| 3385 | 30 | |
| 3386 | 36 | |
| 3387 | 53 | |
| 3388 | 37 | |
| 3389 | 42.5 | |
| 3390 | 41 | |
| 3391 | 25 | |
| 3392 | 30 | |
| 3393 | 52.5 | |
| 3394 | 65 | |
| 3395 | 75 | 42 |
| 3396 | 87.5 | 37.5 |
| 3397 | 79.5 | |
| 3398 | 68.5 | |
| 3399 | 70.5 | |
| 3400 | 72.5 | |
| 3401 | 59 | |
| 3402 | 81.5 | 40 |
| 3403 | 32.5 | |
| 3404 | 18.5 | |
| 3405 | 24.5 | |
| 3406 | 27.5 | |
| 3407 | 32.5 | |
| 3408 | 35 | |
| 3409 | 35 | |

### Example 2. Antisense Inhibition of KCNT1

[0466] Inhibition or knockdown of KCNT1 can be demonstrated using a cell-based assay. For example, neurons derived from iPSCs, SH-SY5Y cells, or another available mammalian cell line (e.g., CHO cells) can be tested with oligonucleotides targeting KCNT1 identified above in Example 1 using at least five different dose levels, using transfection reagents such as lipofectamine 2000 (Invitrogen) following the manufacturer's instructions. Cells are harvested at multiple time points up to 7 days post transfection for either mRNA or protein analyses. Knockdown of mRNA and protein are determined by RT-qPCR or western blot analyses respectively, using standard molecular biology techniques as previously described (see, for example, as described in Drouet et al., 2014, PLOS One 9(6): e99341). The relative levels of the KCNT1 mRNA and protein at the different oligonucleotide levels are compared with a mock oligonucleotide control. The most potent oligonucleotides (for example, those which are capable of at least 90% reduction, for example, at least 91%, at least 92%, at least 93%, at least 94%, at least 95%, at least 96% at least 97%, at least 98%, at least 99% or 100%, in protein levels when compared with controls) are selected for subsequent studies.

### Example 3. Design, Selection, and Testing of Antisense Oligonucleotides with Modified Chemistries

[0467] Selected ASOs in tested in Example 1 were synthesized with the sugar and linkage chemistries as shown in Tables 4 and 5.

[0468] For select ASOs, the degree of KCNT1 mRNA knock-down was determined using a taqman quantitative polymerase chain reaction (qPCR assay). Human (BE(2)-M17) neuronal cells line were grown in 96 well plates and transfected with 100 nM ASO using RNAiMAX transfection reagent (ThermoFisher Scientific). After 48 hour incubation at 37° C., cDNA was prepared from each well using the Cell-to-Ct Kit (ThermoFisher Scientific). The expression level of KCNT1 was determined using taqman qPCR assays for either KCNT1 (human Hs01063050_m1 or mouse Mm01330638_g1) or the housekeeping gene HPRT1 (human Hs02800695_m1 or mouse Mm00446968_m1). All taqman assays were predesigned by ThermoFisher Scientific. KCNT1 and HPRT1 detection were multiplexed in a single well. The fold change in KCNT1 was calculated using the ΔΔCp method whereby the expression of KCNT1 is first normalized to HPRT1 (2^{-(CP_KCNT1-Cp_HPRT1)}) in the same well (multiplexed reaction) followed by a secondary normalization to the vehicle, non-transfected control (2^{-(Cp_ASO-Cp_vehicle)}). The assay was performed in biological duplicates and technical triplicates.

[0469] Table 5 provides the oligonucleotide ASO sequences, positions in the KCNT1 transcript (NCBI NM_020822.2 (SEQ ID NO: 3526)), and chemistries used to modify the ASO. In the ASO Gap column, “d” is DNA, “e” indicates that ribonucleoside comprising a 2′-modified (e.g., a 2′-O-(2-methoxyethyl) (2′MOE) modified) ribose, and “k” indicates a bicyclic sugar (e.g., locked nucleoside (LNAs), or cET). In the ASO Linkages column, “s” indicates a phosphorothiate linkage and “o” indicates a phosphodiester linkage. In the “ASO Cytosines” column, “None” indicates that all cytosines are unmodified, while “Modified” indicates that all cytosines are 5-Methyl-2′-deoxycytosine (5-Methyl-dC). To create ASO specific negative controls, select ASOs (SEQ ID NOs: 3512-3525) were synthesized using either engineered mismatches (MM) at positions 5, 9, 13, 17 or a scrambled (SC) strategy whereby the original sequences were reordered in blocks of 5. These negative controls are organized by the original binding position on the NM_020822.2.

TABLE 5
Gap design, linkage chemistry and cytosine modification of sequences.

| | | | Mis- | | | |
|---|---|---|---|---|---|---|
| | | | matches | | | |
| SEQ | | | to | | | |
| ID | Sequence | Posi- | NM_020 | ASO Gap | ASO | ASO |
| NO: | (5′ to 3′) | tion | 822.2 | Design | Linkages | Cytosines |
| 1 | TGATGAAGAACAGCTTGAGC | 374 | 0 | eeeee-d10- | ssssssssssssss | None |
| | | | | eeeee | sssss | |
| 4 | GTTGCCTTTGTAGCTGAGGT | 661 | 0 | eeeee-d10- | ssssssssssssss | None |
| | | | | eeeee | sssss | |
| 5 | GGGATGAACAGGTTCCGCAG | 765 | 0 | eeeee-d10- | ssssssssssssss | None |
| | | | | eeeee | sssss | |
| 6 | AGGATGGCACGGTGGAAGTC | 837 | 0 | eeeee-d10- | ssssssssssssss | None |
| | | | | eeeee | sssss | |
| 7 | GCAGAAGTAGAAGGAGGTCA | 979 | 0 | eeeee-d10- | ssssssssssssss | None |
| | | | | eeeee | sssssss | |
| 8 | TAGATGACCCGCTGGGACCA | 1347 | 0 | eeeee-d10- | ssssssssssssss | None |
| | | | | eeeee | sssss | |
| 9 | GTCCATCTTGGCTCGCATGA | 1399 | 0 | eeeee-d10- | ssssssssssssss | None |
| | | | | eeeee | sssss | |
| 10 | GCCGGGCAGATGCAGTTCAG | 1629 | 0 | eeeee-d10- | ssssssssssssss | None |
| | | | | eeeee | sssss | |
| 12 | GAGCCAGAGAGTAGCTGTCC | 2879 | 0 | eeeee-d10- | ssssssssssssss | None |
| | | | | eeeee | sssss | |
| 13 | TCACGAAGGACTGGTAGAGC | 3008 | 0 | eeeee-d10- | ssssssssssssss | None |
| | | | | eeeee | sssss | |
| 14 | TGATGGTGATCATGTAGTCC | 3029 | 0 | eeeee-d10- | ssssssssssssss | None |
| | | | | eeeee | sssss | |
| 15 | ATGGGGATCTCGGCGCTGGA | 3168 | 0 | eeeee-d10- | ssssssssssssss | None |
| | | | | eeeee | sssss | |
| 17 | TGTCACCCATGCGGATGTGG | 1760 | 0 | eeeee-d10- | ssssssssssssss | None |
| | | | | eeeee | sssss | |
| 25 | TGACCACGTAATAGTCCTGG | 1271 | 0 | eeeee-d10- | ssssssssssssss | None |
| | | | | eeeee | sssss | |
| 26 | ACCTCGTTCCTGCTGCTGAG | 1440 | 0 | eeeee-d10- | ssssssssssssss | None |
| | | | | eeeee | sssss | |
| 28 | ATGCGGATGTGGTACACCTC | 1752 | 0 | eeeee-d10- | ssssssssssssss | None |
| | | | | eeeee | sssss | |
| 29 | GAAGCTCTTGCCCTCGTACT | 1795 | 0 | eeeee-d10- | ssssssssssssss | None |
| | | | | eeeee | sssss | |
| 35 | TTGGCGCGGAACTGCATGAA | 2859 | 0 | eeeee-d10- | ssssssssssssss | None |
| | | | | eeeee | sssss | |
| 38 | GGTCTTGGCGTCCGCCATGT | 2758 | 0 | eeeee-d10- | ssssssssssssss | None |
| | | | | eeeee | sssss | |
| 50 | CGGATGAGATAGACAATGTC | 3654 | 0 | eeeee-d10- | ssssssssssssss | None |
| | | | | eeeee | sssss | |
| 62 | CGCGGAAGAACTTGCTGTCA | 1775 | 0 | eeeee-d10- | ssssssssssssss | None |
| | | | | eeeee | sssss | |
| 77 | TGGCGTACTTGCACTCCTCC | 1601 | 0 | eeeee-d10- | ssssssssssssss | None |
| | | | | eeeee | sssss | |
| 80 | GTGCGGTCCACCTCGTTCCT | 1449 | 0 | eeeee-d10- | ssssssssssssss | None |
| | | | | eeeee | sssss | |
| 584 | ATTATGGCCACGATGACCTG | 612 | 0 | eeeee-d10- | ssssssssssssss | None |
| | | | | eeeee | sssss | |
| 587 | CTTATTATGGCCACGATGAC | 615 | 0 | eeeee-d10- | ssssssssssssss | None |
| | | | | eeeee | sssss | |
| 588 | GCTTATTATGGCCACGATGA | 616 | 0 | eeeee-d10- | ssssssssssssss | None |
| | | | | eeeee | sssss | |
| 625 | TTTGTAGCTGAGGTAGATGA | 655 | 0 | eeeee-d10- | ssssssssssssss | None |
| | | | | eeeee | sssss | |
| 626 | CTTTGTAGCTGAGGTAGATG | 656 | 0 | eeeee-d10- | ssssssssssssss | None |
| | | | | eeeee | sssss | |
| 627 | CCTTTGTAGCTGAGGTAGAT | 657 | 0 | eeeee-d10- | ssssssssssssss | None |
| | | | | eeeee | sssss | |
| 628 | GCCTTTGTAGCTGAGGTAGA | 658 | 0 | eeeee-d10- | ssssssssssssss | None |
| | | | | eeeee | sssss | |
| 629 | TGCCTTTGTAGCTGAGGTAG | 659 | 0 | eeeee-d10- | ssssssssssssss | None |
| | | | | eeeee | sssss | |
| 630 | TTGCCTTTGTAGCTGAGGTA | 660 | 0 | eeeee-d10- | ssssssssssssss | None |
| | | | | eeeee | sssss | |
| 631 | TGTTGCCTTTGTAGCTGAGG | 662 | 0 | eeeee-d10- | ssssssssssssss | None |
| | | | | eeeee | sssss | |
| 632 | ATGTTGCCTTTGTAGCTGAG | 663 | 0 | eeeee-d10- | ssssssssssssss | None |
| | | | | eeeee | sssss | |
| 633 | GATGTTGCCTTTGTAGCTGA | 664 | 0 | eeeee-d10- | ssssssssssssss | None |
| | | | | eeeee | sssss | |
| 634 | AGATGTTGCCTTTGTAGCTG | 665 | 0 | eeeee-d10- | ssssssssssssss | None |
| | | | | eeeee | sssss | |
| 635 | CAGATGTTGCCTTTGTAGCT | 666 | 0 | eeeee-d10- | ssssssssssssss | None |
| | | | | eeeee | sssss | |
| 636 | CCAGATGTTGCCTTTGTAGC | 667 | 0 | eeeee-d10- | ssssssssssssss | None |
| | | | | eeeee | sssss | |
| 637 | CCCAGATGTTGCCTTTGTAG | 668 | 0 | eeeee-d10- | ssssssssssssss | None |
| | | | | eeeee | sssss | |
| 638 | TCCCAGATGTTGCCTTTGTA | 669 | 0 | eeeee-d10- | ssssssssssssss | None |
| | | | | eeeee | sssss | |
| 639 | CTCCCAGATGTTGCCTTTGT | 670 | 0 | eeeee-d10- | ssssssssssssss | None |
| | | | | eeeee | sssss | |
| 640 | GCTCCCAGATGTTGCCTTTG | 671 | 0 | eeeee-d10- | ssssssssssssss | None |
| | | | | eeeee | sssss | |
| 641 | TGCTCCCAGATGTTGCCTTT | 672 | 0 | eeeee-d10- | ssssssssssssss | None |
| | | | | eeeee | sssss | |
| 642 | CTGCTCCCAGATGTTGCCTT | 673 | 0 | eeeee-d10- | ssssssssssssss | None |
| | | | | eeeee | sssss | |
| 643 | TCTGCTCCCAGATGTTGCCT | 674 | 0 | eeeee-d10- | ssssssssssssss | None |
| | | | | eeeee | sssss | |
| 644 | ATCTGCTCCCAGATGTTGCC | 675 | 0 | eeeee-d10- | ssssssssssssss | None |
| | | | | eeeee | sssss | |
| 645 | GATCTGCTCCCAGATGTTGC | 676 | 0 | eeeee-d10- | ssssssssssssss | None |
| | | | | eeeee | sssss | |
| 646 | AGATCTGCTCCCAGATGTTG | 677 | 0 | eeeee-d10- | ssssssssssssss | None |
| | | | | eeeee | sssss | |
| 647 | AAGATCTGCTCCCAGATGTT | 678 | 0 | eeeee-d10- | ssssssssssssss | None |
| | | | | eeeee | sssss | |
| 648 | GAAGATCTGCTCCCAGATGT | 679 | 0 | eeeee-d10- | ssssssssssssss | None |
| | | | | eeeee | sssss | |
| 649 | GGAAGATCTGCTCCCAGATG | 680 | 0 | eeeee-d10- | ssssssssssssss | None |
| | | | | eeeee | sssss | |
| 672 | TCATCTCCAGGACGAAGGAC | 704 | 0 | eeeee-d10- | ssssssssssssss | None |
| | | | | eeeee | sssss | |
| 675 | TGATCATCTCCAGGACGAAG | 707 | 0 | eeeee-d10- | ssssssssssssss | None |
| | | | | eeeee | sssss | |
| 751 | TTCCAGCGCGTGCTTGGCCA | 805 | 0 | eeeee-d10- | ssssssssssssss | None |
| | | | | eeeee | sssssss | |
| 753 | TTTTCCAGCGCGTGCTTGGC | 807 | 0 | eeeee-d10- | ssssssssssssss | None |
| | | | | eeeee | sssssss | |
| 756 | ATGTTTTCCAGCGCGTGCTT | 810 | 0 | eeeee-d10- | ssssssssssssss | None |
| | | | | eeeee | sssssss | |
| 758 | TCATGTTTTCCAGCGCGTGC | 812 | 0 | eeeee-d10- | ssssssssssssss | None |
| | | | | eeeee | sssssss | |
| 759 | ATCATGTTTTCCAGCGCGTG | 813 | 0 | eeeee-d10- | ssssssssssssss | None |
| | | | | eeeee | sssssss | |
| 988 | CTGCAGTGGGAGCACCACGA | 1090 | 0 | eeeee-d10- | ssssssssssssss | None |
| | | | | eeeee | sssssss | |
| 1017 | CTCCATCCAGAGGTAGACGA | 1120 | 0 | eeeee-d10- | ssssssssssssss | None |
| | | | | eeeee | sssssss | |
| 1018 | GCTCCATCCAGAGGTAGACG | 1121 | 0 | eeeee-d10- | ssssssssssssss | None |
| | | | | eeeee | sssssss | |
| 1019 | CGCTCCATCCAGAGGTAGAC | 1122 | 0 | eeeee-d10- | ssssssssssssss | None |
| | | | | eeeee | sssssss | |
| 1021 | GCCGCTCCATCCAGAGGTAG | 1124 | 0 | eeeee-d10- | ssssssssssssss | None |
| | | | | eeeee | sssssss | |
| 1028 | GACTTCTGCCGCTCCATCCA | 1131 | 0 | eeeee-d10- | ssssssssssssss | None |
| | | | | eeeee | sssssss | |
| 1045 | GGCTGTAGTTGCCCCCTGAC | 1148 | 0 | eeeee-d10- | ssssssssssssss | None |
| | | | | eeeee | sssssss | |
| 1046 | CGGCTGTAGTTGCCCCCTGA | 1149 | 0 | eeeee-d10- | ssssssssssssss | None |
| | | | | eeeee | sssssss | |
| 1047 | GCGGCTGTAGTTGCCCCCTG | 1150 | 0 | eeeee-d10- | ssssssssssssss | None |
| | | | | eeeee | sssssss | |
| 1071 | ACGTGCTTCTCCGTCTGCGC | 1176 | 0 | eeeee-d10- | ssssssssssssss | None |
| | | | | eeeee | sssssss | |
| 1100 | TCGATCTTGAGGGAGCTGAC | 1206 | 0 | eeeee-d10- | ssssssssssssss | None |
| | | | | eeeee | sssssss | |
| 1130 | CGTAGAACTCGTTCAGGAAG | 1238 | 0 | eeeee-d10- | ssssssssssssss | None |
| | | | | eeeee | sssssss | |
| 1131 | GCGTAGAACTCGTTCAGGAA | 1239 | 0 | eeeee-d10- | ssssssssssssss | None |
| | | | | eeeee | sssssss | |
| 1132 | GGCGTAGAACTCGTTCAGGA | 1240 | 0 | eeeee-d10- | ssssssssssssss | None |
| | | | | eeeee | sssssss | |
| 1133 | GGGCGTAGAACTCGTTCAGG | 1241 | 0 | eeeee-d10- | ssssssssssssss | None |
| | | | | eeeee | sssssss | |
| 1134 | TGGGCGTAGAACTCGTTCAG | 1242 | 0 | eeeee-d10- | ssssssssssssss | None |
| | | | | eeeee | sssssss | |
| 1145 | ATGACCACGTAATAGTCCTG | 1272 | 0 | eeeee-d10- | ssssssssssssss | None |
| | | | | eeeee | sssssss | |
| 1146 | GATGACCACGTAATAGTCCT | 1273 | 0 | eeeee-d10- | ssssssssssssss | None |
| | | | | eeeee | sssssss | |
| 1154 | GGGCACAGGATGACCACGTA | 1281 | 0 | eeeee-d10- | ssssssssssssss | None |
| | | | | eeeee | sssssss | |
| 1195 | CCCGCTGGGACCACAGAGGG | 1340 | 0 | eeeee-d10- | ssssssssssssss | None |
| | | | | eeeee | sssss | |
| 1196 | ACCCGCTGGGACCACAGAGG | 1341 | 0 | eeeee-d10- | ssssssssssssss | None |
| | | | | eeeee | sssss | |
| 1197 | GACCCGCTGGGACCACAGAG | 1342 | 0 | eeeee-d10- | ssssssssssssss | None |
| | | | | eeeee | sssss | |
| 1198 | TGACCCGCTGGGACCACAGA | 1343 | 0 | eeeee-d10- | ssssssssssssss | None |
| | | | | eeeee | sssss | |
| 1199 | ATGACCCGCTGGGACCACAG | 1344 | 0 | eeeee-d10- | ssssssssssssss | None |
| | | | | eeeee | sssss | |
| 1200 | GATGACCCGCTGGGACCACA | 1345 | 0 | eeeee-d10- | ssssssssssssss | None |
| | | | | eeeee | sssss | |
| 1201 | AGATGACCCGCTGGGACCAC | 1346 | 0 | eeeee-d10- | ssssssssssssss | None |
| | | | | eeeee | sssss | |
| 1202 | GTAGATGACCCGCTGGGACC | 1348 | 0 | eeeee-d10- | ssssssssssssss | None |
| | | | | eeeee | sssss | |
| 1203 | GGTAGATGACCCGCTGGGAC | 1349 | 0 | eeeee-d10- | ssssssssssssss | None |
| | | | | eeeee | sssss | |
| 1204 | AGGTAGATGACCCGCTGGGA | 1350 | 0 | eeeee-d10- | ssssssssssssss | None |
| | | | | eeeee | sssss | |
| 1205 | GAGGTAGATGACCCGCTGGG | 1351 | 0 | eeeee-d10- | ssssssssssssss | None |
| | | | | eeeee | sssss | |
| 1206 | GGAGGTAGATGACCCGCTGG | 1352 | 0 | eeeee-d10- | ssssssssssssss | None |
| | | | | eeeee | sssss | |
| 1207 | TGGAGGTAGATGACCCGCTG | 1353 | 0 | eeeee-d10- | ssssssssssssss | None |
| | | | | eeeee | sssss | |
| 1208 | CTGGAGGTAGATGACCCGCT | 1354 | 0 | eeeee-d10- | ssssssssssssss | None |
| | | | | eeeee | sssss | |
| 1209 | CCTGGAGGTAGATGACCCGC | 1355 | 0 | eeeee-d10- | ssssssssssssss | None |
| | | | | eeeee | sssss | |
| 1210 | CCCTGGAGGTAGATGACCCG | 1356 | 0 | eeeee-d10- | ssssssssssssss | None |
| | | | | eeeee | sssss | |
| 1211 | GCCCTGGAGGTAGATGACCC | 1357 | 0 | eeeee-d10- | ssssssssssssss | None |
| | | | | eeeee | sssss | |
| 1212 | AGCCCTGGAGGTAGATGACC | 1358 | 0 | eeeee-d10- | ssssssssssssss | None |
| | | | | eeeee | sssss | |
| 1213 | GAGCCCTGGAGGTAGATGAC | 1359 | 0 | eeeee-d10- | ssssssssssssss | None |
| | | | | eeeee | sssss | |
| 1214 | AGAGCCCTGGAGGTAGATGA | 1360 | 0 | eeeee-d10- | ssssssssssssss | None |
| | | | | eeeee | sssss | |
| 1215 | CAGAGCCCTGGAGGTAGATG | 1361 | 0 | eeeee-d10- | ssssssssssssss | None |
| | | | | eeeee | sssss | |
| 1216 | GCAGAGCCCTGGAGGTAGAT | 1362 | 0 | eeeee-d10- | ssssssssssssss | None |
| | | | | eeeee | sssss | |
| 1217 | TGCAGAGCCCTGGAGGTAGA | 1363 | 0 | eeeee-d10- | ssssssssssssss | None |
| | | | | eeeee | sssss | |
| 1218 | GTGCAGAGCCCTGGAGGTAG | 1364 | 0 | eeeee-d10- | ssssssssssssss | None |
| | | | | eeeee | sssss | |
| 1219 | AGTGCAGAGCCCTGGAGGTA | 1365 | 0 | eeeee-d10- | ssssssssssssss | None |
| | | | | eeeee | sssss | |
| 1220 | GAGTGCAGAGCCCTGGAGGT | 1366 | 0 | eeeee-d10- | ssssssssssssss | None |
| | | | | eeeee | sssss | |
| 1221 | TGAGTGCAGAGCCCTGGAGG | 1367 | 0 | eeeee-d10- | ssssssssssssss | None |
| | | | | eeeee | sssss | |
| 1222 | TTGAGTGCAGAGCCCTGGAG | 1368 | 0 | eeeee-d10- | ssssssssssssss | None |
| | | | | eeeee | sssss | |
| 1223 | TTTGAGTGCAGAGCCCTGGA | 1369 | 0 | eeeee-d10- | ssssssssssssss | None |
| | | | | eeeee | sssss | |
| 1224 | CTTTGAGTGCAGAGCCCTGG | 1370 | 0 | eeeee-d10- | ssssssssssssss | None |
| | | | | eeeee | sssss | |
| 1243 | GCTCGCATGAGGTCCTGGTC | 1389 | 0 | eeeee-d10- | ssssssssssssss | None |
| | | | | eeeee | sssssss | |
| 1253 | TGTCCATCTTGGCTCGCATG | 1400 | 0 | eeeee-d10- | ssssssssssssss | None |
| | | | | eeeee | sssssss | |
| 1255 | ATTGTCCATCTTGGCTCGCA | 1402 | 0 | eeeee-d10- | ssssssssssssss | None |
| | | | | eeeee | sssssss | |
| 1302 | CCGTGCGGTCCACCTCGTTC | 1451 | 0 | eeeee-d10- | ssssssssssssss | None |
| | | | | eeeee | sssssss | |
| 1303 | GCCGTGCGGTCCACCTCGTT | 1452 | 0 | eeeee-d10- | ssssssssssssss | None |
| | | | | eeeee | sssssss | |
| 1304 | AGCCGTGCGGTCCACCTCGT | 1453 | 0 | eeeee-d10- | ssssssssssssss | None |
| | | | | eeeee | sssssss | |
| 1335 | GCGAAGTCCTTCACGGCCCA | 1500 | 0 | eeeee-d10- | ssssssssssssss | None |
| | | | | eeeee | sssssss | |
| 1337 | GGGCGAAGTCCTTCACGGCC | 1502 | 0 | eeeee-d10- | ssssssssssssss | None |
| | | | | eeeee | sssssss | |
| 1338 | GAGGATCTGGACGTAGAGGG | 1531 | 0 | eeeee-d10- | ssssssssssssss | None |
| | | | | eeeee | sssssss | |
| 1339 | TTGAGGATCTGGACGTAGAG | 1533 | 0 | eeeee-d10- | ssssssssssssss | None |
| | | | | eeeee | sssssss | |
| 1364 | AACTTGACGTGAAACTTGTT | 1560 | 0 | eeeee-d10- | ssssssssssssss | None |
| | | | | eeeee | sssssss | |
| 1368 | AGCAAACTTGACGTGAAACT | 1564 | 0 | eeeee-d10- | ssssssssssssss | None |
| | | | | eeeee | sssssss | |
| 1388 | CGTACTTGCACTCCTCCTCA | 1598 | 0 | eeeee-d10- | ssssssssssssss | None |
| | | | | eeeee | sssssss | |
| 1392 | CATGGCGTACTTGCACTCCT | 1603 | 0 | eeeee-d10- | ssssssssssssss | None |
| | | | | eeeee | sssssss | |
| 1402 | TCAGCGCCAGCATGGCGTAC | 1613 | 0 | eeeee-d10- | ssssssssssssss | None |
| | | | | eeeee | sssssss | |
| 1416 | CGGGCAGATGCAGTTCAGCG | 1627 | 0 | eeeee-d10- | ssssssssssssss | None |
| | | | | eeeee | sssssss | |
| 1473 | CCATACATGCGCTGCCACTG | 1716 | 0 | eeeee-d10- | ssssssssssssss | None |
| | | | | eeeee | sssssss | |
| 1496 | TACACCTCGTTGCCGGAGCA | 1740 | 0 | eeeee-d10- | ssssssssssssss | None |
| | | | | eeeee | sssss | |
| 1497 | GTACACCTCGTTGCCGGAGC | 1741 | 0 | eeeee-d10- | ssssssssssssss | None |
| | | | | eeeee | sssss | |
| 1498 | GGTACACCTCGTTGCCGGAG | 1742 | 0 | eeeee-d10- | ssssssssssssss | None |
| | | | | eeeee | sssss | |
| 1499 | TGGTACACCTCGTTGCCGGA | 1743 | 0 | eeeee-d10- | ssssssssssssss | None |
| | | | | eeeee | sssss | |
| 1500 | GTGGTACACCTCGTTGCCGG | 1744 | 0 | eeeee-d10- | ssssssssssssss | None |
| | | | | eeeee | sssss | |
| 1501 | TGTGGTACACCTCGTTGCCG | 1745 | 0 | eeeee-d10- | ssssssssssssss | None |
| | | | | eeeee | sssss | |
| 1502 | ATGTGGTACACCTCGTTGCC | 1746 | 0 | eeeee-d10- | ssssssssssssss | None |
| | | | | eeeee | sssss | |
| 1503 | GATGTGGTACACCTCGTTGC | 1747 | 0 | eeeee-d10- | ssssssssssssss | None |
| | | | | eeeee | sssss | |
| 1504 | GGATGTGGTACACCTCGTTG | 1748 | 0 | eeeee-d10- | ssssssssssssss | None |
| | | | | eeeee | sssss | |
| 1505 | CGGATGTGGTACACCTCGTT | 1749 | 0 | eeeee-d10- | ssssssssssssss | None |
| | | | | eeeee | sssss | |
| 1506 | GCGGATGTGGTACACCTCGT | 1750 | 0 | eeeee-d10- | ssssssssssssss | None |
| | | | | eeeee | sssss | |
| 1507 | TGCGGATGTGGTACACCTCG | 1751 | 0 | eeeee-d10- | ssssssssssssss | None |
| | | | | eeeee | sssss | |
| 1508 | CATGCGGATGTGGTACACCT | 1753 | 0 | eeeee-d10- | ssssssssssssss | None |
| | | | | eeeee | sssss | |
| 1509 | CCATGCGGATGTGGTACACC | 1754 | 0 | eeeee-d10- | ssssssssssssss | None |
| | | | | eeeee | sssss | |
| 1510 | CCCATGCGGATGTGGTACAC | 1755 | 0 | eeeee-d10- | ssssssssssssss | None |
| | | | | eeeee | sssss | |
| 1511 | ACCCATGCGGATGTGGTACA | 1756 | 0 | eeeee-d10- | ssssssssssssss | None |
| | | | | eeeee | sssss | |
| 1512 | CACCCATGCGGATGTGGTAC | 1757 | 0 | eeeee-d10- | ssssssssssssss | None |
| | | | | eeeee | sssss | |
| 1513 | TCACCCATGCGGATGTGGTA | 1758 | 0 | eeeee-d10- | ssssssssssssss | None |
| | | | | eeeee | sssss | |
| 1514 | GTCACCCATGCGGATGTGGT | 1759 | 0 | eeeee-d10- | ssssssssssssss | None |
| | | | | eeeee | sssss | |
| 1515 | CTGTCACCCATGCGGATGTG | 1761 | 0 | eeeee-d10- | ssssssssssssss | None |
| | | | | eeeee | sssss | |
| 1516 | GCTGTCACCCATGCGGATGT | 1762 | 0 | eeeee-d10- | ssssssssssssss | None |
| | | | | eeeee | sssss | |
| 1517 | TGCTGTCACCCATGCGGATG | 1763 | 0 | eeeee-d10- | ssssssssssssss | None |
| | | | | eeeee | sssss | |
| 1518 | TTGCTGTCACCCATGCGGAT | 1764 | 0 | eeeee-d10- | ssssssssssssss | None |
| | | | | eeeee | sssss | |
| 1519 | CTTGCTGTCACCCATGCGGA | 1765 | 0 | eeeee-d10- | ssssssssssssss | None |
| | | | | eeeee | sssss | |
| 1520 | ACTTGCTGTCACCCATGCGG | 1766 | 0 | eeeee-d10- | ssssssssssssss | None |
| | | | | eeeee | sssss | |
| 1521 | AACTTGCTGTCACCCATGCG | 1767 | 0 | eeeee-d10- | ssssssssssssss | None |
| | | | | eeeee | sssss | |
| 1522 | GAACTTGCTGTCACCCATGC | 1768 | 0 | eeeee-d10- | ssssssssssssss | None |
| | | | | eeeee | sssss | |
| 1523 | AGAACTTGCTGTCACCCATG | 1769 | 0 | eeeee-d10- | ssssssssssssss | None |
| | | | | eeeee | sssss | |
| 1524 | AAGAACTTGCTGTCACCCAT | 1770 | 0 | eeeee-d10- | ssssssssssssss | None |
| | | | | eeeee | sssss | |
| 1525 | GAAGAACTTGCTGTCACCCA | 1771 | 0 | eeeee-d10- | ssssssssssssss | None |
| | | | | eeeee | sssss | |
| 1526 | GGAAGAACTTGCTGTCACCC | 1772 | 0 | eeeee-d10- | ssssssssssssss | None |
| | | | | eeeee | sssss | |
| 1527 | CGGAAGAACTTGCTGTCACC | 1773 | 0 | eeeee-d10- | ssssssssssssss | None |
| | | | | eeeee | sssss | |
| 1528 | GCGGAAGAACTTGCTGTCAC | 1774 | 0 | eeeee-d10- | ssssssssssssss | None |
| | | | | eeeee | sssss | |
| 1529 | TCGCGGAAGAACTTGCTGTC | 1776 | 0 | eeeee-d10- | ssssssssssssss | None |
| | | | | eeeee | sssss | |
| 1530 | CTCGCGGAAGAACTTGCTGT | 1777 | 0 | eeeee-d10- | ssssssssssssss | None |
| | | | | eeeee | sssss | |
| 1531 | ACTCGCGGAAGAACTTGCTG | 1778 | 0 | eeeee-d10- | ssssssssssssss | None |
| | | | | eeeee | sssss | |
| 1532 | TACTCGCGGAAGAACTTGCT | 1779 | 0 | eeeee-d10- | ssssssssssssss | None |
| | | | | eeeee | sssss | |
| 1533 | GTACTCGCGGAAGAACTTGC | 1780 | 0 | eeeee-d10- | ssssssssssssss | None |
| | | | | eeeee | sssss | |
| 1534 | CGTACTCGCGGAAGAACTTG | 1781 | 0 | eeeee-d10- | ssssssssssssss | None |
| | | | | eeeee | sssss | |
| 1535 | TCGTACTCGCGGAAGAACTT | 1782 | 0 | eeeee-d10- | ssssssssssssss | None |
| | | | | eeeee | sssss | |
| 1536 | CTCGTACTCGCGGAAGAACT | 1783 | 0 | eeeee-d10- | ssssssssssssss | None |
| | | | | eeeee | sssss | |
| 1537 | CCTCGTACTCGCGGAAGAAC | 1784 | 0 | eeeee-d10- | ssssssssssssss | None |
| | | | | eeeee | sssss | |
| 1538 | CCCTCGTACTCGCGGAAGAA | 1785 | 0 | eeeee-d10- | ssssssssssssss | None |
| | | | | eeeee | sssss | |
| 1539 | GCCCTCGTACTCGCGGAAGA | 1786 | 0 | eeeee-d10- | ssssssssssssss | None |
| | | | | eeeee | sssss | |
| 1540 | TGCCCTCGTACTCGCGGAAG | 1787 | 0 | eeeee-d10- | ssssssssssssss | None |
| | | | | eeeee | sssss | |
| 1541 | TTGCCCTCGTACTCGCGGAA | 1788 | 0 | eeeee-d10- | ssssssssssssss | None |
| | | | | eeeee | sssss | |
| 1542 | CTTGCCCTCGTACTCGCGGA | 1789 | 0 | eeeee-d10- | ssssssssssssss | None |
| | | | | eeeee | sssss | |
| 1543 | TCTTGCCCTCGTACTCGCGG | 1790 | 0 | eeeee-d10- | ssssssssssssss | None |
| | | | | eeeee | sssss | |
| 1544 | CTCTTGCCCTCGTACTCGCG | 1791 | 0 | eeeee-d10- | ssssssssssssss | None |
| | | | | eeeee | sssss | |
| 1545 | GCTCTTGCCCTCGTACTCGC | 1792 | 0 | eeeee-d10- | ssssssssssssss | None |
| | | | | eeeee | sssss | |
| 1546 | AGCTCTTGCCCTCGTACTCG | 1793 | 0 | eeeee-d10- | ssssssssssssss | None |
| | | | | eeeee | sssss | |
| 1547 | AAGCTCTTGCCCTCGTACTC | 1794 | 0 | eeeee-d10- | ssssssssssssss | None |
| | | | | eeeee | sssss | |
| 1548 | TGAAGCTCTTGCCCTCGTAC | 1796 | 0 | eeeee-d10- | ssssssssssssss | None |
| | | | | eeeee | sssss | |
| 1549 | GTGAAGCTCTTGCCCTCGTA | 1797 | 0 | eeeee-d10- | ssssssssssssss | None |
| | | | | eeeee | sssss | |
| 1550 | GGTGAAGCTCTTGCCCTCGT | 1798 | 0 | eeeee-d10- | ssssssssssssss | None |
| | | | | eeeee | sssss | |
| 1551 | AGGTGAAGCTCTTGCCCTCG | 1799 | 0 | eeeee-d10- | ssssssssssssss | None |
| | | | | eeeee | sssss | |
| 1552 | TAGGTGAAGCTCTTGCCCTC | 1800 | 0 | eeeee-d10- | ssssssssssssss | None |
| | | | | eeeee | sssss | |
| 1553 | GTAGGTGAAGCTCTTGCCCT | 1801 | 0 | eeeee-d10- | ssssssssssssss | None |
| | | | | eeeee | sssss | |
| 1554 | CGTAGGTGAAGCTCTTGCCC | 1802 | 0 | eeeee-d10- | ssssssssssssss | None |
| | | | | eeeee | sssss | |
| 1555 | GCGTAGGTGAAGCTCTTGCC | 1803 | 0 | eeeee-d10- | ssssssssssssss | None |
| | | | | eeeee | sssss | |
| 1556 | CGCGTAGGTGAAGCTCTTGC | 1804 | 0 | eeeee-d10- | ssssssssssssss | None |
| | | | | eeeee | sssss | |
| 1557 | CCGCGTAGGTGAAGCTCTTG | 1805 | 0 | eeeee-d10- | ssssssssssssss | None |
| | | | | eeeee | sssss | |
| 1558 | GCCGCGTAGGTGAAGCTCTT | 1806 | 0 | eeeee-d10- | ssssssssssssss | None |
| | | | | eeeee | sssss | |
| 1559 | GGCCGCGTAGGTGAAGCTCT | 1807 | 0 | eeeee-d10- | ssssssssssssss | None |
| | | | | eeeee | sssss | |
| 1560 | AGGCCGCGTAGGTGAAGCTC | 1808 | 0 | eeeee-d10- | ssssssssssssss | None |
| | | | | eeeee | sssss | |
| 1561 | AAGGCCGCGTAGGTGAAGCT | 1809 | 0 | eeeee-d10- | ssssssssssssss | None |
| | | | | eeeee | sssss | |
| 1562 | GAAGGCCGCGTAGGTGAAGC | 1810 | 0 | eeeee-d10- | ssssssssssssss | None |
| | | | | eeeee | sssss | |
| 1563 | GGAAGGCCGCGTAGGTGAAG | 1811 | 0 | eeeee-d10- | ssssssssssssss | None |
| | | | | eeeee | sssss | |
| 1564 | TGGAAGGCCGCGTAGGTGAA | 1812 | 0 | eeeee-d10- | ssssssssssssss | None |
| | | | | eeeee | sssss | |
| 1565 | GTGGAAGGCCGCGTAGGTGA | 1813 | 0 | eeeee-d10- | ssssssssssssss | None |
| | | | | eeeee | sssss | |
| 1566 | CGTGGAAGGCCGCGTAGGTG | 1814 | 0 | eeeee-d10- | ssssssssssssss | None |
| | | | | eeeee | sssss | |
| 1567 | GCGTGGAAGGCCGCGTAGGT | 1815 | 0 | eeeee-d10- | ssssssssssssss | None |
| | | | | eeeee | sssss | |
| 1570 | TGGGCGTGGAAGGCCGCGTA | 1818 | 0 | eeeee-d10- | ssssssssssssss | None |
| | | | | eeeee | sssssss | |
| 1573 | TTGTGGGCGTGGAAGGCCGC | 1821 | 0 | eeeee-d10- | ssssssssssssss | None |
| | | | | eeeee | sssssss | |
| 1574 | CTTGTGGGCGTGGAAGGCCG | 1822 | 0 | eeeee-d10- | ssssssssssssss | None |
| | | | | eeeee | sssssss | |
| 1601 | TCAGCCCGATGAGGCACACG | 1850 | 0 | eeeee-d10- | ssssssssssssss | None |
| | | | | eeeee | sssssss | |
| 1602 | TTCAGCCCGATGAGGCACAC | 1851 | 0 | eeeee-d10- | ssssssssssssss | None |
| | | | | eeeee | sssssss | |
| 1968 | ATGTAGGGCGAGTTGGGAGG | 2334 | 0 | eeeee-d10- | ssssssssssssss | None |
| | | | | eeeee | sssssss | |
| 1973 | TGCCGATGTAGGGCGAGTTG | 2339 | 0 | eeeee-d10- | ssssssssssssss | None |
| | | | | eeeee | sssssss | |
| 1974 | CTGCCGATGTAGGGCGAGTT | 2340 | 0 | eeeee-d10- | ssssssssssssss | None |
| | | | | eeeee | sssssss | |
| 1975 | GCTGCCGATGTAGGGCGAGT | 2341 | 0 | eeeee-d10- | ssssssssssssss | None |
| | | | | eeeee | sssssss | |
| 1976 | AGCTGCCGATGTAGGGCGAG | 2342 | 0 | eeeee-d10- | ssssssssssssss | None |
| | | | | eeeee | sssssss | |
| 1977 | GAGCTGCCGATGTAGGGCGA | 2343 | 0 | eeeee-d10- | ssssssssssssss | None |
| | | | | eeeee | sssssss | |
| 2002 | TTGTCCAGCCGCAGGCAGCA | 2403 | 0 | eeeee-d10- | ssssssssssssss | None |
| | | | | eeeee | sssssss | |
| 2044 | AACCCGTAGGCCTTGGCGTC | 2448 | 0 | eeeee-d10- | ssssssssssssss | None |
| | | | | eeeee | sssssss | |
| 2046 | TGAACCCGTAGGCCTTGGCG | 2450 | 0 | eeeee-d10- | ssssssssssssss | None |
| | | | | eeeee | sssssss | |
| 2050 | TTCTTGAACCCGTAGGCCTT | 2454 | 0 | eeeee-d10- | ssssssssssssss | None |
| | | | | eeeee | sssssss | |
| 2052 | TGTTCTTGAACCCGTAGGCC | 2456 | 0 | eeeee-d10- | ssssssssssssss | None |
| | | | | eeeee | sssssss | |
| 2053 | CTTGTTCTTGAACCCGTAGG | 2458 | 0 | eeeee-d10- | ssssssssssssss | None |
| | | | | eeeee | sssssss | |
| 2054 | GCTTGTTCTTGAACCCGTAG | 2459 | 0 | eeeee-d10- | ssssssssssssss | None |
| | | | | eeeee | sssssss | |
| 2055 | AGCTTGTTCTTGAACCCGTA | 2460 | 0 | eeeee-d10- | ssssssssssssss | None |
| | | | | eeeee | sssssss | |
| 2236 | AGGTTGTCCGCATAGATGAT | 2694 | 0 | eeeee-d10- | ssssssssssssss | None |
| | | | | eeeee | sssssss | |
| 2294 | GGCGTCCGCCATGTAGTCCT | 2752 | 0 | eeeee-d10- | ssssssssssssss | None |
| | | | | eeeee | sssssss | |
| 2303 | CGATGGTCTTGGCGTCCGCC | 2762 | 0 | eeeee-d10- | ssssssssssssss | None |
| | | | | eeeee | sssssss | |
| 2304 | ACGATGGTCTTGGCGTCCGC | 2763 | 0 | eeeee-d10- | ssssssssssssss | None |
| | | | | eeeee | sssssss | |
| 2305 | GACGATGGTCTTGGCGTCCG | 2764 | 0 | eeeee-d10- | ssssssssssssss | None |
| | | | | eeeee | sssssss | |
| 2307 | TTGACGATGGTCTTGGCGTC | 2766 | 0 | eeeee-d10- | ssssssssssssss | None |
| | | | | eeeee | sssssss | |
| 2310 | ACGTTGACGATGGTCTTGGC | 2769 | 0 | eeeee-d10- | ssssssssssssss | None |
| | | | | eeeee | sssssss | |
| 2311 | CACGTTGACGATGGTCTTGG | 2770 | 0 | eeeee-d10- | ssssssssssssss | None |
| | | | | eeeee | sssssss | |
| 2319 | CATGGTCTGCACGTTGACGA | 2779 | 0 | eeeee-d10- | ssssssssssssss | None |
| | | | | eeeee | sssssss | |
| 2320 | ACATGGTCTGCACGTTGACG | 2780 | 0 | eeeee-d10- | ssssssssssssss | None |
| | | | | eeeee | sssssss | |
| 2324 | CGGAACATGGTCTGCACGTT | 2784 | 0 | eeeee-d10- | ssssssssssssss | None |
| | | | | eeeee | sssssss | |
| 2327 | AGCCGGAACATGGTCTGCAC | 2787 | 0 | eeeee-d10- | ssssssssssssss | None |
| | | | | eeeee | sssssss | |
| 2329 | AGAGCCGGAACATGGTCTGC | 2789 | 0 | eeeee-d10- | ssssssssssssss | None |
| | | | | eeeee | sssssss | |
| 2346 | TGGGTGAGCTCCGTGGTGAT | 2823 | 0 | eeeee-d10- | ssssssssssssss | None |
| | | | | eeeee | sssssss | |
| 2367 | CATGAAGCGCATGTTGGAAG | 2845 | 0 | eeeee-d10- | ssssssssssssss | None |
| | | | | eeeee | sssssss | |
| 2375 | CGGAACTGCATGAAGCGCAT | 2853 | 0 | eeeee-d10- | ssssssssssssss | None |
| | | | | eeeee | sssssss | |
| 2377 | CGCGGAACTGCATGAAGCGC | 2855 | 0 | eeeee-d10- | ssssssssssssss | None |
| | | | | eeeee | sssssss | |
| 2378 | GCGCGGAACTGCATGAAGCG | 2856 | 0 | eeeee-d10- | ssssssssssssss | None |
| | | | | eeeee | sssssss | |
| 2379 | GGCGCGGAACTGCATGAAGC | 2857 | 0 | eeeee-d10- | ssssssssssssss | None |
| | | | | eeeee | sssssss | |
| 2382 | CCTTGGCGCGGAACTGCATG | 2861 | 0 | eeeee-d10- | ssssssssssssss | None |
| | | | | eeeee | sssssss | |
| 2383 | TCCTTGGCGCGGAACTGCAT | 2862 | 0 | eeeee-d10- | ssssssssssssss | None |
| | | | | eeeee | sssssss | |
| 2384 | GTCCTTGGCGCGGAACTGCA | 2863 | 0 | eeeee-d10- | ssssssssssssss | None |
| | | | | eeeee | sssssss | |
| 2392 | GAGTAGCTGTCCTTGGCGCG | 2871 | 0 | eeeee-d10- | ssssssssssssss | None |
| | | | | eeeee | sssssss | |
| 2393 | AGAGTAGCTGTCCTTGGCGC | 2872 | 0 | eeeee-d10- | ssssssssssssss | None |
| | | | | eeeee | sssssss | |
| 2394 | GAGAGTAGCTGTCCTTGGCG | 2873 | 0 | eeeee-d10- | ssssssssssssss | None |
| | | | | eeeee | sssssss | |
| 2505 | CACGAAGGACTGGTAGAGCA | 3007 | 0 | eeeee-d10- | ssssssssssssss | None |
| | | | | eeeee | sssssss | |
| 2525 | GATGGTGATCATGTAGTCCT | 3028 | 0 | eeeee-d10- | ssssssssssssss | None |
| | | | | eeeee | sssssss | |
| 2529 | CGGGTGATGGTGATCATGTA | 3033 | 0 | eeeee-d10- | ssssssssssssss | None |
| | | | | eeeee | sssssss | |
| 2530 | CCGGGTGATGGTGATCATGT | 3034 | 0 | eeeee-d10- | ssssssssssssss | None |
| | | | | eeeee | sssssss | |
| 2533 | CAGCCGGGTGATGGTGATCA | 3037 | 0 | eeeee-d10- | ssssssssssssss | None |
| | | | | eeeee | sssssss | |
| 2534 | GCAGCCGGGTGATGGTGATC | 3038 | 0 | eeeee-d10- | ssssssssssssss | None |
| | | | | eeeee | sssssss | |
| 2591 | TCCACAGGTCGCCCTCGGTG | 3110 | 0 | eeeee-d10- | ssssssssssssss | None |
| | | | | eeeee | sssss | |
| 2592 | ATCCACAGGTCGCCCTCGGT | 3111 | 0 | eeeee-d10- | ssssssssssssss | None |
| | | | | eeeee | sssss | |
| 2593 | GATCCACAGGTCGCCCTCGG | 3112 | 0 | eeeee-d10- | ssssssssssssss | None |
| | | | | eeeee | sssss | |
| 2594 | GGATCCACAGGTCGCCCTCG | 3113 | 0 | eeeee-d10- | ssssssssssssss | None |
| | | | | eeeee | sssss | |
| 2595 | CGGATCCACAGGTCGCCCTC | 3114 | 0 | eeeee-d10- | ssssssssssssss | None |
| | | | | eeeee | sssss | |
| 2596 | GCGGATCCACAGGTCGCCCT | 3115 | 0 | eeeee-d10- | ssssssssssssss | None |
| | | | | eeeee | sssss | |
| 2597 | TGCGGATCCACAGGTCGCCC | 3116 | 0 | eeeee-d10- | ssssssssssssss | None |
| | | | | eeeee | sssss | |
| 2598 | GTGCGGATCCACAGGTCGCC | 3117 | 0 | eeeee-d10- | ssssssssssssss | None |
| | | | | eeeee | sssss | |
| 2599 | CGTGCGGATCCACAGGTCGC | 3118 | 0 | eeeee-d10- | ssssssssssssss | None |
| | | | | eeeee | sssss | |
| 2600 | ACGTGCGGATCCACAGGTCG | 3119 | 0 | eeeee-d10- | ssssssssssssss | None |
| | | | | eeeee | sssss | |
| 2601 | TACGTGCGGATCCACAGGTC | 3120 | 0 | eeeee-d10- | ssssssssssssss | None |
| | | | | eeeee | sssss | |
| 2602 | GTACGTGCGGATCCACAGGT | 3121 | 0 | eeeee-d10- | ssssssssssssss | None |
| | | | | eeeee | sssss | |
| 2603 | CGTACGTGCGGATCCACAGG | 3122 | 0 | eeeee-d10- | ssssssssssssss | None |
| | | | | eeeee | sssss | |
| 2604 | CCGTACGTGCGGATCCACAG | 3123 | 0 | eeeee-d10- | ssssssssssssss | None |
| | | | | eeeee | sssss | |
| 2605 | GCCGTACGTGCGGATCCACA | 3124 | 0 | eeeee-d10- | ssssssssssssss | None |
| | | | | eeeee | sssss | |
| 2606 | GGCCGTACGTGCGGATCCAC | 3125 | 0 | eeeee-d10- | ssssssssssssss | None |
| | | | | eeeee | sssss | |
| 2607 | AGCTTCTGGAAGAGGCGGCC | 3141 | 0 | eeeee-d10- | ssssssssssssss | None |
| | | | | eeeee | sssss | |
| 2608 | GAGCTTCTGGAAGAGGCGGC | 3142 | 0 | eeeee-d10- | ssssssssssssss | None |
| | | | | eeeee | sssss | |
| 2609 | AGAGCTTCTGGAAGAGGCGG | 3143 | 0 | eeeee-d10- | ssssssssssssss | None |
| | | | | eeeee | sssss | |
| 2610 | CAGAGCTTCTGGAAGAGGCG | 3144 | 0 | eeeee-d10- | ssssssssssssss | None |
| | | | | eeeee | sssss | |
| 2611 | GCAGAGCTTCTGGAAGAGGC | 3145 | 0 | eeeee-d10- | ssssssssssssss | None |
| | | | | eeeee | sssss | |
| 2612 | AGCAGAGCTTCTGGAAGAGG | 3146 | 0 | eeeee-d10- | ssssssssssssss | None |
| | | | | eeeee | sssss | |
| 2613 | GAGCAGAGCTTCTGGAAGAG | 3147 | 0 | eeeee-d10- | ssssssssssssss | None |
| | | | | eeeee | sssss | |
| 2614 | GGAGCAGAGCTTCTGGAAGA | 3148 | 0 | eeeee-d10- | ssssssssssssss | None |
| | | | | eeeee | sssss | |
| 2615 | AGGAGCAGAGCTTCTGGAAG | 3149 | 0 | eeeee-d10- | ssssssssssssss | None |
| | | | | eeeee | sssss | |
| 2616 | GAGGAGCAGAGCTTCTGGAA | 3150 | 0 | eeeee-d10- | ssssssssssssss | None |
| | | | | eeeee | sssss | |
| 2617 | GGAGGAGCAGAGCTTCTGGA | 3151 | 0 | eeeee-d10- | ssssssssssssss | None |
| | | | | eeeee | sssss | |
| 2618 | TGGAGGAGCAGAGCTTCTGG | 3152 | 0 | eeeee-d10- | ssssssssssssss | None |
| | | | | eeeee | sssss | |
| 2619 | CTGGAGGAGCAGAGCTTCTG | 3153 | 0 | eeeee-d10- | ssssssssssssss | None |
| | | | | eeeee | sssss | |
| 2620 | GCTGGAGGAGCAGAGCTTCT | 3154 | 0 | eeeee-d10- | ssssssssssssss | None |
| | | | | eeeee | sssss | |
| 2621 | CGCTGGAGGAGCAGAGCTTC | 3155 | 0 | eeeee-d10- | ssssssssssssss | None |
| | | | | eeeee | sssss | |
| 2622 | GCGCTGGAGGAGCAGAGCTT | 3156 | 0 | eeeee-d10- | ssssssssssssss | None |
| | | | | eeeee | sssss | |
| 2623 | GGCGCTGGAGGAGCAGAGCT | 3157 | 0 | eeeee-d10- | ssssssssssssss | None |
| | | | | eeeee | sssss | |
| 2624 | CGGCGCTGGAGGAGCAGAGC | 3158 | 0 | eeeee-d10- | ssssssssssssss | None |
| | | | | eeeee | sssss | |
| 2625 | TCGGCGCTGGAGGAGCAGAG | 3159 | 0 | eeeee-d10- | ssssssssssssss | None |
| | | | | eeeee | sssss | |
| 2626 | CTCGGCGCTGGAGGAGCAGA | 3160 | 0 | eeeee-d10- | ssssssssssssss | None |
| | | | | eeeee | sssss | |
| 2627 | TCTCGGCGCTGGAGGAGCAG | 3161 | 0 | eeeee-d10- | ssssssssssssss | None |
| | | | | eeeee | sssss | |
| 2628 | ATCTCGGCGCTGGAGGAGCA | 3162 | 0 | eeeee-d10- | ssssssssssssss | None |
| | | | | eeeee | sssss | |
| 2629 | GATCTCGGCGCTGGAGGAGC | 3163 | 0 | eeeee-d10- | ssssssssssssss | None |
| | | | | eeeee | sssss | |
| 2630 | GGATCTCGGCGCTGGAGGAG | 3164 | 0 | eeeee-d10- | ssssssssssssss | None |
| | | | | eeeee | sssss | |
| 2631 | GGGATCTCGGCGCTGGAGGA | 3165 | 0 | eeeee-d10- | ssssssssssssss | None |
| | | | | eeeee | sssss | |
| 2679 | GTTCACCGAGATCTGGGACT | 3250 | 0 | eeeee-d10- | ssssssssssssss | None |
| | | | | eeeee | sssssss | |
| 2680 | CGTTCACCGAGATCTGGGAC | 3251 | 0 | eeeee-d10- | ssssssssssssss | None |
| | | | | eeeee | sssssss | |
| 2681 | ACGTTCACCGAGATCTGGGA | 3252 | 0 | eeeee-d10- | ssssssssssssss | None |
| | | | | eeeee | sssssss | |
| 2784 | GAGCGCCGGTACAGGCTGAG | 3486 | 0 | eeeee-d10- | ssssssssssssss | None |
| | | | | eeeee | sssssss | |
| 2813 | CGGTTCTTCACCAGCTCGGA | 3522 | 0 | eeeee-d10- | ssssssssssssss | None |
| | | | | eeeee | sssssss | |
| 2901 | TCGGGCGGAGGGTTGATGAG | 3615 | 0 | eeeee-d10- | ssssssssssssss | None |
| | | | | eeeee | sssssss | |
| 2902 | GTCGGGCGGAGGGTTGATGA | 3616 | 0 | eeeee-d10- | ssssssssssssss | None |
| | | | | eeeee | sssssss | |
| 2903 | TGTCGGGCGGAGGGTTGATG | 3617 | 0 | eeeee-d10- | ssssssssssssss | None |
| | | | | eeeee | sssssss | |
| 2947 | GGGTCGGAGCGGATGAGATA | 3663 | 0 | eeeee-d10- | ssssssssssssss | None |
| | | | | eeeee | sssssss | |
| 3385 | CGGGGGTGGGCGTAGAACTC | 1248 | 0 | eeeee-d10- | ssssssssssssss | None |
| | | | | eeeee | sssssss | |
| 3386 | CCGGGGGTGGGCGTAGAACT | 1249 | 0 | eeeee-d10- | ssssssssssssss | None |
| | | | | eeeee | sssssss | |
| 3387 | GGGGCGAAGTCCTTCACGGC | 1503 | 0 | eeeee-d10- | ssssssssssssss | None |
| | | | | eeeee | sssssss | |
| 3388 | GGGGGCGAAGTCCTTCACGG | 1504 | 0 | eeeee-d10- | ssssssssssssss | None |
| | | | | eeeee | sssssss | |
| 3389 | TGGGGGCGAAGTCCTTCACG | 1505 | 0 | eeeee-d10- | ssssssssssssss | None |
| | | | | eeeee | sssssss | |
| 3390 | TTGGGGGCGAAGTCCTTCAC | 1506 | 0 | eeeee-d10- | ssssssssssssss | None |
| | | | | eeeee | sssssss | |
| 3391 | GGCAGTTGGGGGCGAAGTCC | 1511 | 0 | eeeee-d10- | ssssssssssssss | None |
| | | | | eeeee | sssssss | |
| 3392 | GGGCAGTTGGGGGCGAAGTC | 1512 | 0 | eeeee-d10- | ssssssssssssss | None |
| | | | | eeeee | sssssss | |
| 3393 | AGGATCTGGACGTAGAGGGG | 1530 | 0 | eeeee-d10- | ssssssssssssss | None |
| | | | | eeeee | sssssss | |
| 3394 | GTAGTAGACCATGGGGAAGC | 2629 | 0 | eeeee-d10- | ssssssssssssss | None |
| | | | | eeeee | sssssss | |
| 3395 | CGGCCGTACGTGCGGATCCA | 3126 | 0 | eeeee-d10- | ssssssssssssss | None |
| | | | | eeeee | sssss | |
| 3396 | GCGGCCGTACGTGCGGATCC | 3127 | 0 | eeeee-d10- | ssssssssssssss | None |
| | | | | eeeee | sssss | |
| 3397 | GGCGGCCGTACGTGCGGATC | 3128 | 0 | eeeee-d10- | ssssssssssssss | None |
| | | | | eeeee | sssss | |
| 3398 | AGGCGGCCGTACGTGCGGAT | 3129 | 0 | eeeee-d10- | ssssssssssssss | None |
| | | | | eeeee | sssss | |
| 3399 | GAGGCGGCCGTACGTGCGGA | 3130 | 0 | eeeee-d10- | ssssssssssssss | None |
| | | | | eeeee | sssss | |
| 3400 | AGAGGCGGCCGTACGTGCGG | 3131 | 0 | eeeee-d10- | ssssssssssssss | None |
| | | | | eeeee | sssss | |
| 3401 | AAGAGGCGGCCGTACGTGCG | 3132 | 0 | eeeee-d10- | ssssssssssssss | None |
| | | | | eeeee | sssss | |
| 3402 | CCAATGGGGATCTCGGCGCT | 3171 | 0 | eeeee-d10- | ssssssssssssss | None |
| | | | | eeeee | sssss | |
| 3403 | GCCAATGGGGATCTCGGCGC | 3172 | 0 | eeeee-d10- | ssssssssssssss | None |
| | | | | eeeee | sssssss | |
| 3404 | TGCCAATGGGGATCTCGGCG | 3173 | 0 | eeeee-d10- | ssssssssssssss | None |
| | | | | eeeee | sssssss | |
| 3405 | ATGCCAATGGGGATCTCGGC | 3174 | 0 | eeeee-d10- | ssssssssssssss | None |
| | | | | eeeee | sssssss | |
| 3406 | GATGCCAATGGGGATCTCGG | 3175 | 0 | eeeee-d10- | ssssssssssssss | None |
| | | | | eeeee | sssssss | |
| 3407 | TCCGGTAGATGCCAATGGGG | 3182 | 0 | eeeee-d10- | ssssssssssssss | None |
| | | | | eeeee | sssssss | |
| 3408 | GGGGTCGGAGCGGATGAGAT | 3664 | 0 | eeeee-d10- | ssssssssssssss | None |
| | | | | eeeee | sssssss | |
| 3409 | GGGGGTCGGAGCGGATGAGA | 3665 | 0 | eeeee-d10- | ssssssssssssss | None |
| | | | | eeeee | sssssss | |
| 3410 | TGATGAAGAACAGCTTGAGC | 374 | 0 | d20 | ssssssssssssss | None |
| | | | | | sssss | |
| 3411 | GTTGCCTTTGTAGCTGAGGT | 661 | 0 | d20 | ssssssssssssss | None |
| | | | | | sssss | |
| 3412 | GGGATGAACAGGTTCCGCAG | 765 | 0 | d20 | ssssssssssssss | None |
| | | | | | sssss | |
| 3413 | AGGATGGCACGGTGGAAGTC | 837 | 0 | d20 | ssssssssssssss | None |
| | | | | | sssss | |
| 3414 | GCAGAAGTAGAAGGAGGTCA | 979 | 0 | d20 | ssssssssssssss | None |
| | | | | | sssss | |
| 3415 | TAGATGACCCGCTGGGACCA | 1347 | 0 | d20 | ssssssssssssss | None |
| | | | | | sssss | |
| 3416 | GCCGGGCAGATGCAGTTCAG | 1629 | 0 | d20 | ssssssssssssss | None |
| | | | | | sssss | |
| 3417 | GAGCCAGAGAGTAGCTGTCC | 2879 | 0 | d20 | ssssssssssssss | None |
| | | | | | sssss | |
| 3418 | TCACGAAGGACTGGTAGAGC | 3008 | 0 | d20 | ssssssssssssss | None |
| | | | | | sssss | |
| 3419 | ATGGGGATCTCGGCGCTGGA | 3168 | 0 | d20 | ssssssssssssss | None |
| | | | | | sssss | |
| 3420 | GTTGCCTTTGTAGCTGAGGT | 661 | 0 | eeeee-d10- | ssssssssssssss | Modified |
| | | | | eeeee | sssss | |
| 3421 | CAGATGTTGCCTTTGTAGCT | 666 | 0 | eeeee-d10- | ssssssssssssss | Modified |
| | | | | eeeee | sssss | |
| 3422 | TAGATGACCCGCTGGGACCA | 1347 | 0 | eeeee-d10- | ssssssssssssss | Modified |
| | | | | eeeee | sssss | |
| 3423 | GGTAGATGACCCGCTGGGAC | 1349 | 0 | eeeee-d10- | ssssssssssssss | Modified |
| | | | | eeeee | sssss | |
| 3424 | GGAGGTAGATGACCCGCTGG | 1352 | 0 | eeeee-d10- | ssssssssssssss | Modified |
| | | | | eeeee | sssss | |
| 3425 | CTGGAGGTAGATGACCCGCT | 1354 | 0 | eeeee-d10- | ssssssssssssss | Modified |
| | | | | eeeee | sssss | |
| 3426 | ATGTGGTACACCTCGTTGCC | 1746 | 0 | eeeee-d10- | ssssssssssssss | Modified |
| | | | | eeeee | sssss | |
| 3427 | TGCGGATGTGGTACACCTCG | 1751 | 0 | eeeee-d10- | ssssssssssssss | Modified |
| | | | | eeeee | sssss | |
| 3428 | CCCATGCGGATGTGGTACAC | 1755 | 0 | eeeee-d10- | ssssssssssssss | Modified |
| | | | | eeeee | sssss | |
| 3429 | AGCTCTTGCCCTCGTACTCG | 1793 | 0 | eeeee-d10- | ssssssssssssss | Modified |
| | | | | eeeee | sssss | |
| 3430 | AGGTGAAGCTCTTGCCCTCG | 1799 | 0 | eeeee-d10- | ssssssssssssss | Modified |
| | | | | eeeee | sssss | |
| 3431 | GCGTAGGTGAAGCTCTTGCC | 1803 | 0 | eeeee-d10- | ssssssssssssss | Modified |
| | | | | eeeee | sssss | |
| 3432 | GGCCGCGTAGGTGAAGCTCT | 1807 | 0 | eeeee-d10- | ssssssssssssss | Modified |
| | | | | eeeee | sssss | |
| 3433 | AAGGCCGCGTAGGTGAAGCT | 1809 | 0 | eeeee-d10- | ssssssssssssss | Modified |
| | | | | eeeee | sssss | |
| 3434 | GATCCACAGGTCGCCCTCGG | 3112 | 0 | eeeee-d10- | ssssssssssssss | Modified |
| | | | | eeeee | sssss | |
| 3435 | CGGATCCACAGGTCGCCCTC | 3114 | 0 | eeeee-d10- | ssssssssssssss | Modified |
| | | | | eeeee | sssss | |
| 3436 | GGCCGTACGTGCGGATCCAC | 3125 | 0 | eeeee-d10- | ssssssssssssss | Modified |
| | | | | eeeee | sssss | |
| 3437 | GCGGCCGTACGTGCGGATCC | 3127 | 0 | eeeee-d10- | ssssssssssssss | Modified |
| | | | | eeeee | sssss | |
| 3438 | ATCTCGGCGCTGGAGGAGCA | 3162 | 0 | eeeee-d10- | ssssssssssssss | Modified |
| | | | | eeeee | sssss | |
| 3439 | CCAATGGGGATCTCGGCGCT | 3171 | 0 | eeeee-d10- | ssssssssssssss | Modified |
| | | | | eeeee | sssss | |
| 3440 | GAAGAGGCGGCCGTACGTGC | 3133 | 0 | eeeee-d10- | ssssssssssssss | None |
| | | | | eeeee | sssss | |
| 3441 | GGAAGAGGCGGCCGTACGTG | 3134 | 0 | eeeee-d10- | ssssssssssssss | None |
| | | | | eeeee | sssss | |
| 3442 | TGGAAGAGGCGGCCGTACGT | 3135 | 0 | eeeee-d10- | ssssssssssssss | None |
| | | | | eeeee | sssss | |
| 3443 | CTGGAAGAGGCGGCCGTACG | 3136 | 0 | eeeee-d10- | ssssssssssssss | None |
| | | | | eeeee | sssss | |
| 3444 | TCTGGAAGAGGCGGCCGTAC | 3137 | 0 | eeeee-d10- | ssssssssssssss | None |
| | | | | eeeee | sssss | |
| 3445 | TTCTGGAAGAGGCGGCCGTA | 3138 | 0 | eeeee-d10- | ssssssssssssss | None |
| | | | | eeeee | sssss | |
| 3446 | CTTCTGGAAGAGGCGGCCGT | 3139 | 0 | eeeee-d10- | ssssssssssssss | None |
| | | | | eeeee | sssss | |
| 3447 | GCTTCTGGAAGAGGCGGCCG | 3140 | 0 | eeeee-d10- | ssssssssssssss | None |
| | | | | eeeee | sssss | |
| 3448 | GGGGATCTCGGCGCTGGAGG | 3166 | 0 | eeeee-d10- | ssssssssssssss | None |
| | | | | eeeee | sssss | |
| 3449 | TGGGGATCTCGGCGCTGGAG | 3167 | 0 | eeeee-d10- | ssssssssssssss | None |
| | | | | eeeee | sssss | |
| 3450 | AATGGGGATCTCGGCGCTGG | 3169 | 0 | eeeee-d10- | ssssssssssssss | None |
| | | | | eeeee | sssss | |
| 3451 | CAATGGGGATCTCGGCGCTG | 3170 | 0 | eeeee-d10- | ssssssssssssss | None |
| | | | | eeeee | sssss | |
| 3452 | ATGTTGCCTTTGTAGCTGAGGT | 661 | 0 | eeeee-d12- | ssssssssssssss | None |
| | | | | eeeee | sssssss | |
| 3453 | CCCAGATGTTGCCTTTGTAGCT | 666 | 0 | eeeee-d12- | ssssssssssssss | None |
| | | | | eeeee | sssssss | |
| 3454 | GGTAGATGACCCGCTGGGACCA | 1347 | 0 | eeeee-d12- | ssssssssssssss | None |
| | | | | eeeee | sssssss | |
| 3455 | GAGGTAGATGACCCGCTGGGAC | 1349 | 0 | eeeee-d12- | ssssssssssssss | None |
| | | | | eeeee | sssssss | |
| 3456 | CTGGAGGTAGATGACCCGCTGG | 1352 | 0 | eeeee-d12- | ssssssssssssss | None |
| | | | | eeeee | sssssss | |
| 3457 | CCCTGGAGGTAGATGACCCGCT | 1354 | 0 | eeeee-d12- | ssssssssssssss | None |
| | | | | eeeee | sssssss | |
| 3458 | GGATGTGGTACACCTCGTTGCC | 1746 | 0 | eeeee-d12- | ssssssssssssss | None |
| | | | | eeeee | sssssss | |
| 3459 | CATGCGGATGTGGTACACCTCG | 1751 | 0 | eeeee-d12- | ssssssssssssss | None |
| | | | | eeeee | sssssss | |
| 3460 | CACCCATGCGGATGTGGTACAC | 1755 | 0 | eeeee-d12- | ssssssssssssss | None |
| | | | | eeeee | sssssss | |
| 3461 | GAAGCTCTTGCCCTCGTACTCG | 1793 | 0 | eeeee-d12- | ssssssssssssss | None |
| | | | | eeeee | sssssss | |
| 3462 | GTAGGTGAAGCTCTTGCCCTCG | 1799 | 0 | eeeee-d12- | ssssssssssssss | None |
| | | | | eeeee | sssssss | |
| 3463 | CCGCGTAGGTGAAGCTCTTGCC | 1803 | 0 | eeeee-d12- | ssssssssssssss | None |
| | | | | eeeee | sssssss | |
| 3464 | AAGGCCGCGTAGGTGAAGCTCT | 1807 | 0 | eeeee-d12- | ssssssssssssss | None |
| | | | | eeeee | sssssss | |
| 3465 | GGAAGGCCGCGTAGGTGAAGCT | 1809 | 0 | eeeee-d12- | ssssssssssssss | None |
| | | | | eeeee | sssssss | |
| 3466 | CGGATCCACAGGTCGCCCTCGG | 3112 | 0 | eeeee-d12- | ssssssssssssss | None |
| | | | | eeeee | sssssss | |
| 3467 | TGCGGATCCACAGGTCGCCCTC | 3114 | 0 | eeeee-d12- | ssssssssssssss | None |
| | | | | eeeee | sssssss | |
| 3468 | GCGGCCGTACGTGCGGATCCAC | 3125 | 0 | eeeee-d12- | ssssssssssssss | None |
| | | | | eeeee | sssssss | |
| 3469 | AGGCGGCCGTACGTGCGGATCC | 3127 | 0 | eeeee-d12- | ssssssssssssss | None |
| | | | | eeeee | sssssss | |
| 3470 | GGATCTCGGCGCTGGAGGAGCA | 3162 | 0 | eeeee-d12- | ssssssssssssss | None |
| | | | | eeeee | sssssss | |
| 3471 | TGCCAATGGGGATCTCGGCGCT | 3171 | 0 | eeeee-d12- | ssssssssssssss | None |
| | | | | eeeee | sssssss | |
| 3472 | GTTGCCTTTGTAGCTGAG | 661 | 0 | eeeee-d8- | sooosssssssss | None |
| | | | | eeeee | ooss | |
| 3473 | CAGATGTTGCCTTTGTAG | 666 | 0 | eeeee-d8- | sooosssssssss | None |
| | | | | eeeee | ooss | |
| 3474 | TAGATGACCCGCTGGGAC | 1347 | 0 | eeeee-d8- | sooosssssssss | None |
| | | | | eeeee | ooss | |
| 3475 | GGTAGATGACCCGCTGGG | 1349 | 0 | eeeee-d8- | sooosssssssss | None |
| | | | | eeeee | ooss | |
| 3476 | GGAGGTAGATGACCCGCT | 1352 | 0 | eeeee-d8- | sooosssssssss | None |
| | | | | eeeee | ooss | |
| 3477 | CTGGAGGTAGATGACCCG | 1354 | 0 | eeeee-d8- | sooosssssssss | None |
| | | | | eeeee | ooss | |
| 3478 | ATGTGGTACACCTCGTTG | 1746 | 0 | eeeee-d8- | sooosssssssss | None |
| | | | | eeeee | ooss | |
| 3479 | TGCGGATGTGGTACACCT | 1751 | 0 | eeeee-d8- | sooosssssssss | None |
| | | | | eeeee | ooss | |
| 3480 | CCCATGCGGATGTGGTAC | 1755 | 0 | eeeee-d8- | sooosssssssss | None |
| | | | | eeeee | ooss | |
| 3481 | AGCTCTTGCCCTCGTACT | 1793 | 0 | eeeee-d8- | sooosssssssss | None |
| | | | | eeeee | ooss | |
| 3482 | AGGTGAAGCTCTTGCCCT | 1799 | 0 | eeeee-d8- | sooosssssssss | None |
| | | | | eeeee | ooss | |
| 3483 | GCGTAGGTGAAGCTCTTG | 1803 | 0 | eeeee-d8- | sooosssssssss | None |
| | | | | eeeee | ooss | |
| 3484 | GGCCGCGTAGGTGAAGCT | 1807 | 0 | eeeee-d8- | sooosssssssss | None |
| | | | | eeeee | ooss | |
| 3485 | AAGGCCGCGTAGGTGAAG | 1809 | 0 | eeeee-d8- | sooosssssssss | None |
| | | | | eeeee | ooss | |
| 3486 | GATCCACAGGTCGCCCTC | 3112 | 0 | eeeee-d8- | sooosssssssss | None |
| | | | | eeeee | ooss | |
| 3487 | CGGATCCACAGGTCGCCC | 3114 | 0 | eeeee-d8- | sooosssssssss | None |
| | | | | eeeee | ooss | |
| 3488 | GGCCGTACGTGCGGATCC | 3125 | 0 | eeeee-d8- | sooosssssssss | None |
| | | | | eeeee | ooss | |
| 3489 | GCGGCCGTACGTGCGGAT | 3127 | 0 | eeeee-d8- | sooosssssssss | None |
| | | | | eeeee | ooss | |
| 3490 | ATCTCGGCGCTGGAGGAG | 3162 | 0 | eeeee-d8- | sooosssssssss | None |
| | | | | eeeee | ooss | |
| 3491 | CCAATGGGGATCTCGGCG | 3171 | 0 | eeeee-d8- | sooosssssssss | None |
| | | | | eeeee | ooss | |
| 3492 | GTTGCCTTTGTAGCTGA | 661 | 0 | eekk-d8- | soossssssssso | None |
| | | | | kkeee | oss | |
| 3493 | CAGATGTTGCCTTTGTA | 666 | 0 | eekk-d8- | soossssssssso | None |
| | | | | kkeee | oss | |
| 3494 | TAGATGACCCGCTGGGA | 1347 | 0 | eekk-d8- | soossssssssso | None |
| | | | | kkeee | oss | |
| 3495 | GGTAGATGACCCGCTGG | 1349 | 0 | eekk-d8- | soossssssssso | None |
| | | | | kkeee | oss | |
| 3496 | GGAGGTAGATGACCCGC | 1352 | 0 | eekk-d8- | soossssssssso | None |
| | | | | kkeee | oss | |
| 3497 | CTGGAGGTAGATGACCC | 1354 | 0 | eekk-d8- | soossssssssso | None |
| | | | | kkeee | oss | |
| 3498 | ATGTGGTACACCTCGTT | 1746 | 0 | eekk-d8- | soossssssssso | None |
| | | | | kkeee | oss | |
| 3499 | TGCGGATGTGGTACACC | 1751 | 0 | eekk-d8- | soossssssssso | None |
| | | | | kkeee | oss | |
| 3500 | CCCATGCGGATGTGGTA | 1755 | 0 | eekk-d8- | soossssssssso | None |
| | | | | kkeee | oss | |
| 3501 | AGCTCTTGCCCTCGTAC | 1793 | 0 | eekk-d8- | soossssssssso | None |
| | | | | kkeee | oss | |
| 3502 | AGGTGAAGCTCTTGCCC | 1799 | 0 | eekk-d8- | soossssssssso | None |
| | | | | kkeee | oss | |
| 3503 | GCGTAGGTGAAGCTCTT | 1803 | 0 | eekk-d8- | soossssssssso | None |
| | | | | kkeee | oss | |
| 3504 | GGCCGCGTAGGTGAAGC | 1807 | 0 | eekk-d8- | soossssssssso | None |
| | | | | kkeee | oss | |
| 3505 | AAGGCCGCGTAGGTGAA | 1809 | 0 | eekk-d8- | soossssssssso | None |
| | | | | kkeee | oss | |
| 3506 | GATCCACAGGTCGCCCT | 3112 | 0 | eekk-d8- | soossssssssso | None |
| | | | | kkeee | oss | |
| 3507 | CGGATCCACAGGTCGCC | 3114 | 0 | eekk-d8- | soossssssssso | None |
| | | | | kkeee | oss | |
| 3508 | GGCCGTACGTGCGGATC | 3125 | 0 | eekk-d8- | soossssssssso | None |
| | | | | kkeee | oss | |
| 3509 | GCGGCCGTACGTGCGGA | 3127 | 0 | eekk-d8- | soossssssssso | None |
| | | | | kkeee | oss | |
| 3510 | ATCTCGGCGCTGGAGGA | 3162 | 0 | eekk-d8- | soossssssssso | None |
| | | | | kkeee | oss | |
| 3511 | CCAATGGGGATCTCGGC | 3171 | 0 | eekk-d8- | soossssssssso | None |
| | | | | kkeee | oss | |
| 3512 | GTTGGCTTAGTACCTGTGGT | 661 | 4 | d20 | ssssssssssssss | None |
| | | | | | sssss | |
| 3513 | CTTTGGTTGCGAGGTTAGCT | 661 | 10 | d20 | ssssssssssssss | None |
| | | | | | sssss | |
| 3514 | GCAGGAGTGGAAAGAGATCA | 979 | 4 | d20 | ssssssssssssss | None |
| | | | | | sssss | |
| 3515 | AGTAGGCAGAGGTCAAAGGA | 979 | 18 | d20 | ssssssssssssss | None |
| | | | | | sssss | |
| 3516 | GTTGGCTTAGTACCTGTGGT | 661 | 4 | eeeee-d10- | ssssssssssssss | None |
| | | | | eeeee | sssss | |
| 3517 | GGTACATGTCCCCCTGCGAC | 1349 | 4 | eeeee-d10- | ssssssssssssss | None |
| | | | | eeeee | sssss | |
| 3518 | GGAGCTAGTTGAGCCGGTGG | 1352 | 4 | eeeee-d10- | ssssssssssssss | None |
| | | | | eeeee | sssss | |
| 3519 | ATGTCGTAGACCACGTAGCC | 1746 | 4 | eeeee-d10- | ssssssssssssss | None |
| | | | | eeeee | sssss | |
| 3520 | CCCAAGCGCATGAGGTTCAC | 1755 | 4 | eeeee-d10- | ssssssssssssss | None |
| | | | | eeeee | sssss | |
| 3521 | GCGTTGGTCAAGGTCTAGCC | 1803 | 4 | eeeee-d10- | ssssssssssssss | None |
| | | | | eeeee | sssss | |
| 3522 | GGCCCCGTTGGTCAAGGTCT | 1807 | 4 | eeeee-d10- | ssssssssssssss | None |
| | | | | eeeee | sssss | |
| 3523 | GCGGGCGTTCGTCCGGTTCC | 3127 | 4 | eeeee-d10- | ssssssssssssss | None |
| | | | | eeeee | sssss | |
| 3524 | ATCTGGGCCCTGCAGGTGCA | 3162 | 4 | eeeee-d10- | ssssssssssssss | None |
| | | | | eeeee | sssss | |
| 3525 | CCAAAGGGCATCACGGGGCT | 3171 | 4 | eeeee-d10- | ssssssssssssss | None |
| | | | | eeeee | sssss | |

[0470] Table 6 provides the oligonucelotide ASO sequences, positions in the KCNT1 transcript (NCBI NM_020822.2), chemistries used to modify the ASO, and percent knockdown of KCNT1 in BE(2)-M17 cells after treatment with the indicated ASO. Here, the data corresponding to different ASO sequences are organized according to the KCNT position, as denoted in the first column. In the ASO Gap column, “e” indicates a 2′-O-(2-methoxyethyl) (2′MOE) modified nucleoside, and “k” indicates a locked nucleoside (LNAs). In the ASO Linkages column, “s” indicates a phosphorothiate linkage and “o” indicates a phosphodiester linkage. In the “ASO Cytosines” column, “None” indicates that all cytosines are unmodified, while “Modified” indicates that all cytosines are 5-Methyl-2′-deoxycytosine (5-Methyl-dC).

[0471] All ASO specific negative controls (SEQ ID NOs: 3512-3525) generated less KCNT1 knockdown in BE(2)-M17 cells compared to their matched targeted ASO. These data confirm the specificity of the assay and highlight the dependence of knockdown on sequence homology. There was generally good concordance between the knockdown obtained with the various chemistries. However, some ASO sequences demonstrated substantially different activity depending on the chemistry used (position 1354: SEQ ID NO: 1208 with 21% knockdown versus SEQ ID NO: 3457 with 59% knockdown). In addition, cytosine modified ASOs were consistently more potent for the majority of tested ASOs. Although activity was observed across each of the entire hotspots tested (NM_020822.2 (SEQ ID NO: 3526): 655 to 680, 1340 to 1370, 1740 to 1815, and 3110 to 3171), there were certain ASOs with greater activity which was not predicted by the sequence homology.

TABLE 6
Percent Knock down of KCNT1 expressed in human (BE(2)-M17) neuronal
cells. Sequences are organized according to KCNT1 position.

| | | | | | BE(2)-M17 |
|---|---|---|---|---|---|
| | | | | ASO | 100 nM ASO |
| Position | SEQ ID NO | ASO Gap | ASO Linkages | Cytosines | Mean |
| 374 | 1 | eeeee-d10-eeeee | sssssssssssssssssss | None | 7 |
| | 3410 | d20 | sssssssssssssssssss | None | 14 |
| 655 | 625 | eeeee-d10-eeeee | sssssssssssssssssss | None | 11 |
| 656 | 626 | eeeee-d10-eeeee | sssssssssssssssssss | None | 34 |
| 657 | 627 | eeeee-d10-eeeee | sssssssssssssssssss | None | 37 |
| 658 | 628 | eeeee-d10-eeeee | sssssssssssssssssss | None | 51 |
| 659 | 629 | eeeee-d10-eeeee | sssssssssssssssssss | None | 44 |
| 660 | 630 | eeeee-d10-eeeee | sssssssssssssssssss | None | 43 |
| 661 | 4 | eeeee-d10-eeeee | sssssssssssssssssss | None | 44 |
| | 3411 | d20 | sssssssssssssssssss | None | 39 |
| | 3420 | eeeee-d10-eeeee | sssssssssssssssssss | Modified | 49 |
| | 3452 | eeeee-d12-eeeee | sssssssssssssssssssss | None | 39 |
| | 3472 | eeeee-d8-eeeee | sooosssssssssooss | None | 38 |
| | 3492 | eekk-d8-kkeee | soosssssssssooss | None | 40 |
| | 3512 | d20 | sssssssssssssssssss | None | 6 |
| | 3513 | d20 | sssssssssssssssssss | None | 5 |
| | 3516 | eeeee-d10-eeeee | sssssssssssssssssss | None | 11 |
| 662 | 631 | eeeee-d10-eeeee | sssssssssssssssssss | None | 33 |
| 663 | 632 | eeeee-d10-eeeee | sssssssssssssssssss | None | 5 |
| 664 | 633 | eeeee-d10-eeeee | sssssssssssssssssss | None | 34 |
| 665 | 634 | eeeee-d10-eeeee | sssssssssssssssssss | None | 37 |
| 666 | 635 | eeeee-d10-eeeee | sssssssssssssssssss | None | 35 |
| 666 | 3421 | eeeee-d10-eeeee | sssssssssssssssssss | Modified | 59 |
| 666 | 3453 | eeeee-d12-eeeee | sssssssssssssssssssss | None | 41 |
| 666 | 3473 | eeeee-d8-eeeee | sooosssssssssooss | None | 19 |
| 666 | 3493 | eekk-d8-kkeee | soosssssssssooss | None | 52 |
| 667 | 636 | eeeee-d10-eeeee | sssssssssssssssssss | None | 40 |
| 668 | 637 | eeeee-d10-eeeee | sssssssssssssssssss | None | 30 |
| 669 | 638 | eeeee-d10-eeeee | sssssssssssssssssss | None | 17 |
| 670 | 639 | eeeee-d10-eeeee | sssssssssssssssssss | None | 26 |
| 671 | 640 | eeeee-d10-eeeee | sssssssssssssssssss | None | 49 |
| 672 | 641 | eeeee-d10-eeeee | sssssssssssssssssss | None | 38 |
| 673 | 642 | eeeee-d10-eeeee | sssssssssssssssssss | None | 56 |
| 674 | 643 | eeeee-d10-eeeee | sssssssssssssssssss | None | 48 |
| 675 | 644 | eeeee-d10-eeeee | sssssssssssssssssss | None | 21 |
| 676 | 645 | eeeee-d10-eeeee | sssssssssssssssssss | None | 50 |
| 677 | 646 | eeeee-d10-eeeee | sssssssssssssssssss | None | 64 |
| 678 | 647 | eeeee-d10-eeeee | sssssssssssssssssss | None | 39 |
| 679 | 648 | eeeee-d10-eeeee | sssssssssssssssssss | None | 41 |
| 680 | 649 | eeeee-d10-eeeee | sssssssssssssssssss | None | 52 |
| 765 | 5 | eeeee-d10-eeeee | sssssssssssssssssss | None | 36 |
| 765 | 3412 | d20 | sssssssssssssssssss | None | 45 |
| 837 | 6 | eeeee-d10-eeeee | sssssssssssssssssss | None | 31 |
| 837 | 3413 | d20 | sssssssssssssssssss | None | 40 |
| 979 | 3414 | d20 | sssssssssssssssssss | None | 35 |
| 979 | 3514 | d20 | sssssssssssssssssss | None | 14 |
| 979 | 3515 | d20 | sssssssssssssssssss | None | 4 |
| 1340 | 1195 | eeeee-d10-eeeee | sssssssssssssssssss | None | 49 |
| 1341 | 1196 | eeeee-d10-eeeee | sssssssssssssssssss | None | 51 |
| 1342 | 1197 | eeeee-d10-eeeee | sssssssssssssssssss | None | 41 |
| 1343 | 1198 | eeeee-d10-eeeee | sssssssssssssssssss | None | 33 |
| 1344 | 1199 | eeeee-d10-eeeee | sssssssssssssssssss | None | 38 |
| 1345 | 1200 | eeeee-d10-eeeee | sssssssssssssssssss | None | 14 |
| 1346 | 1201 | eeeee-d10-eeeee | sssssssssssssssssss | None | 11 |
| 1347 | 8 | eeeee-d10-eeeee | sssssssssssssssssss | None | 25 |
| 1347 | 3415 | d20 | sssssssssssssssssss | None | 32 |
| 1347 | 3422 | eeeee-d10-eeeee | sssssssssssssssssss | Modified | 59 |
| 1347 | 3454 | eeeee-d12-eeeee | sssssssssssssssssssss | None | 37 |
| 1347 | 3474 | eeeee-d8-eeeee | sooosssssssssooss | None | 25 |
| 1347 | 3494 | eekk-d8-kkeee | soosssssssssooss | None | 26 |
| 1348 | 1202 | eeeee-d10-eeeee | sssssssssssssssssss | None | 24 |
| 1349 | 1203 | eeeee-d10-eeeee | sssssssssssssssssss | None | 41 |
| 1349 | 3423 | eeeee-d10-eeeee | sssssssssssssssssss | Modified | 60 |
| 1349 | 3455 | eeeee-d12-eeeee | sssssssssssssssssssss | None | 49 |
| 1349 | 3475 | eeeee-d8-eeeee | sooosssssssssooss | None | 51 |
| 1349 | 3495 | eekk-d8-kkeee | soosssssssssooss | None | 53 |
| 1349 | 3517 | eeeee-d10-eeeee | sssssssssssssssssss | None | 33 |
| 1350 | 1204 | eeeee-d10-eeeee | sssssssssssssssssss | None | 44 |
| 1351 | 1205 | eeeee-d10-eeeee | sssssssssssssssssss | None | 65 |
| 1352 | 1206 | eeeee-d10-eeeee | sssssssssssssssssss | None | 56 |
| 1352 | 3424 | eeeee-d10-eeeee | sssssssssssssssssss | Modified | 63 |
| 1352 | 3456 | eeeee-d12-eeeee | sssssssssssssssssssss | None | 43 |
| 1352 | 3476 | eeeee-d8-eeeee | sooosssssssssooss | None | 18 |
| 1352 | 3496 | eekk-d8-kkeee | soosssssssssooss | None | 50 |
| 1352 | 3518 | eeeee-d10-eeeee | sssssssssssssssssss | None | 39 |
| 1353 | 1207 | eeeee-d10-eeeee | sssssssssssssssssss | None | 55 |
| 1354 | 1208 | eeeee-d10-eeeee | sssssssssssssssssss | None | 21 |
| 1354 | 3425 | eeeee-d10-eeeee | sssssssssssssssssss | Modified | 62 |
| 1354 | 3457 | eeeee-d12-eeeee | sssssssssssssssssssss | None | 59 |
| 1354 | 3477 | eeeee-d8-eeeee | sooosssssssssooss | None | 34 |
| 1354 | 3497 | eekk-d8-kkeee | soosssssssssooss | None | 37 |
| 1355 | 1209 | eeeee-d10-eeeee | sssssssssssssssssss | None | 45 |
| 1356 | 1210 | eeeee-d10-eeeee | sssssssssssssssssss | None | 41 |
| 1357 | 1211 | eeeee-d10-eeeee | sssssssssssssssssss | None | 52 |
| 1358 | 1212 | eeeee-d10-eeeee | sssssssssssssssssss | None | 54 |
| 1359 | 1213 | eeeee-d10-eeeee | sssssssssssssssssss | None | 41 |
| 1360 | 1214 | eeeee-d10-eeeee | sssssssssssssssssss | None | 41 |
| 1361 | 1215 | eeeee-d10-eeeee | sssssssssssssssssss | None | 11 |
| 1362 | 1216 | eeeee-d10-eeeee | sssssssssssssssssss | None | 22 |
| 1363 | 1217 | eeeee-d10-eeeee | sssssssssssssssssss | None | 32 |
| 1364 | 1218 | eeeee-d10-eeeee | sssssssssssssssssss | None | 50 |
| 1365 | 1219 | eeeee-d10-eeeee | sssssssssssssssssss | None | 38 |
| 1366 | 1220 | eeeee-d10-eeeee | sssssssssssssssssss | None | 34 |
| 1367 | 1221 | eeeee-d10-eeeee | sssssssssssssssssss | None | 25 |
| 1368 | 1222 | eeeee-d10-eeeee | sssssssssssssssssss | None | 20 |
| 1369 | 1223 | eeeee-d10-eeeee | sssssssssssssssssss | None | −3 |
| 1370 | 1224 | eeeee-d10-eeeee | sssssssssssssssssss | None | 62 |
| 1629 | 10 | eeeee-d10-eeeee | sssssssssssssssssss | None | 53 |
| 1629 | 3416 | d20 | sssssssssssssssssss | None | 45 |
| 1740 | 1496 | eeeee-d10-eeeee | sssssssssssssssssss | None | 45 |
| 1741 | 1497 | eeeee-d10-eeeee | sssssssssssssssssss | None | 64 |
| 1742 | 1498 | eeeee-d10-eeeee | sssssssssssssssssss | None | 67 |
| 1743 | 1499 | eeeee-d10-eeeee | sssssssssssssssssss | None | 44 |
| 1744 | 1500 | eeeee-d10-eeeee | sssssssssssssssssss | None | 42 |
| 1745 | 1501 | eeeee-d10-eeeee | sssssssssssssssssss | None | 21 |
| 1746 | 1502 | eeeee-d10-eeeee | sssssssssssssssssss | None | 32 |
| 1746 | 3426 | eeeee-d10-eeeee | sssssssssssssssssss | Modified | 17 |
| 1746 | 3458 | eeeee-d12-eeeee | sssssssssssssssssssss | None | 44 |
| 1746 | 3478 | eeeee-d8-eeeee | sooosssssssssooss | None | 41 |
| 1746 | 3498 | eekk-d8-kkeee | soosssssssssooss | None | 26 |
| 1746 | 3519 | eeeee-d10-eeeee | sssssssssssssssssss | None | 15 |
| 1747 | 1503 | eeeee-d10-eeeee | sssssssssssssssssss | None | 30 |
| 1748 | 1504 | eeeee-d10-eeeee | sssssssssssssssssss | None | 46 |
| 1749 | 1505 | eeeee-d10-eeeee | sssssssssssssssssss | None | 54 |
| 1750 | 1506 | eeeee-d10-eeeee | sssssssssssssssssss | None | 46 |
| 1751 | 1507 | eeeee-d10-eeeee | sssssssssssssssssss | None | 47 |
| 1751 | 3427 | eeeee-d10-eeeee | sssssssssssssssssss | Modified | 39 |
| 1751 | 3459 | eeeee-d12-eeeee | sssssssssssssssssssss | None | 69 |
| 1751 | 3479 | eeeee-d8-eeeee | sooosssssssssooss | None | 41 |
| 1751 | 3499 | eekk-d8-kkeee | soosssssssssooss | None | 42 |
| 1752 | 28 | eeeee-d10-eeeee | sssssssssssssssssss | None | 49 |
| 1753 | 1508 | eeeee-d10-eeeee | sssssssssssssssssss | None | 54 |
| 1754 | 1509 | eeeee-d10-eeeee | sssssssssssssssssss | None | 43 |
| 1755 | 1510 | eeeee-d10-eeeee | sssssssssssssssssss | None | 72 |
| 1755 | 3428 | eeeee-d10-eeeee | sssssssssssssssssss | Modified | 79 |
| 1755 | 3460 | eeeee-d12-eeeee | sssssssssssssssssssss | None | 61 |
| 1755 | 3480 | eeeee-d8-eeeee | sooosssssssssooss | None | 49 |
| 1755 | 3500 | eekk-d8-kkeee | soosssssssssooss | None | 37 |
| 1755 | 3520 | eeeee-d10-eeeee | sssssssssssssssssss | None | −1 |
| 1756 | 1511 | eeeee-d10-eeeee | sssssssssssssssssss | None | 44 |
| 1757 | 1512 | eeeee-d10-eeeee | sssssssssssssssssss | None | 36 |
| 1758 | 1513 | eeeee-d10-eeeee | sssssssssssssssssss | None | 35 |
| 1759 | 1514 | eeeee-d10-eeeee | sssssssssssssssssss | None | 44 |
| 1760 | 17 | eeeee-d10-eeeee | sssssssssssssssssss | None | 32 |
| 1761 | 1515 | eeeee-d10-eeeee | sssssssssssssssssss | None | 11 |
| 1762 | 1516 | eeeee-d10-eeeee | sssssssssssssssssss | None | 28 |
| 1763 | 1517 | eeeee-d10-eeeee | sssssssssssssssssss | None | 28 |
| 1764 | 1518 | eeeee-d10-eeeee | sssssssssssssssssss | None | 26 |
| 1765 | 1519 | eeeee-d10-eeeee | sssssssssssssssssss | None | 35 |
| 1766 | 1520 | eeeee-d10-eeeee | sssssssssssssssssss | None | 46 |
| 1767 | 1521 | eeeee-d10-eeeee | sssssssssssssssssss | None | 31 |
| 1768 | 1522 | eeeee-d10-eeeee | sssssssssssssssssss | None | 42 |
| 1769 | 1523 | eeeee-d10-eeeee | sssssssssssssssssss | None | 21 |
| 1770 | 1524 | eeeee-d10-eeeee | sssssssssssssssssss | None | 12 |
| 1771 | 1525 | eeeee-d10-eeeee | sssssssssssssssssss | None | −4 |
| 1772 | 1526 | eeeee-d10-eeeee | sssssssssssssssssss | None | 31 |
| 1773 | 1527 | eeeee-d10-eeeee | sssssssssssssssssss | None | 25 |
| 1774 | 1528 | eeeee-d10-eeeee | sssssssssssssssssss | None | 36 |
| 1775 | 62 | eeeee-d10-eeeee | sssssssssssssssssss | None | 49 |
| 1776 | 1529 | eeeee-d10-eeeee | sssssssssssssssssss | None | 36 |
| 1777 | 1530 | eeeee-d10-eeeee | sssssssssssssssssss | None | 52 |
| 1778 | 1531 | eeeee-d10-eeeee | sssssssssssssssssss | None | 54 |
| 1779 | 1532 | eeeee-d10-eeeee | sssssssssssssssssss | None | 22 |
| 1780 | 1533 | eeeee-d10-eeeee | sssssssssssssssssss | None | 63 |
| 1781 | 1534 | eeeee-d10-eeeee | sssssssssssssssssss | None | 63 |
| 1782 | 1535 | eeeee-d10-eeeee | sssssssssssssssssss | None | 34 |
| 1783 | 1536 | eeeee-d10-eeeee | sssssssssssssssssss | None | 17 |
| 1784 | 1537 | eeeee-d10-eeeee | sssssssssssssssssss | None | 24 |
| 1785 | 1538 | eeeee-d10-eeeee | sssssssssssssssssss | None | 40 |
| 1786 | 1539 | eeeee-d10-eeeee | sssssssssssssssssss | None | 53 |
| 1787 | 1540 | eeeee-d10-eeeee | sssssssssssssssssss | None | 46 |
| 1788 | 1541 | eeeee-d10-eeeee | sssssssssssssssssss | None | 46 |
| 1789 | 1542 | eeeee-d10-eeeee | sssssssssssssssssss | None | 71 |
| 1790 | 1543 | eeeee-d10-eeeee | sssssssssssssssssss | None | 41 |
| 1791 | 1544 | eeeee-d10-eeeee | sssssssssssssssssss | None | 34 |
| 1792 | 1545 | eeeee-d10-eeeee | sssssssssssssssssss | None | 38 |
| 1793 | 1546 | eeeee-d10-eeeee | sssssssssssssssssss | None | 52 |
| 1793 | 3429 | eeeee-d10-eeeee | sssssssssssssssssss | Modified | 59 |
| 1793 | 3461 | eeeee-d12-eeeee | sssssssssssssssssssss | None | 25 |
| 1793 | 3481 | eeeee-d8-eeeee | sooosssssssssooss | None | 52 |
| 1793 | 3501 | eekk-d8-kkeee | soosssssssssooss | None | 42 |
| 1794 | 1547 | eeeee-d10-eeeee | sssssssssssssssssss | None | 58 |
| 1795 | 29 | eeeee-d10-eeeee | sssssssssssssssssss | None | 51 |
| 1796 | 1548 | eeeee-d10-eeeee | sssssssssssssssssss | None | 40 |
| 1797 | 1549 | eeeee-d10-eeeee | sssssssssssssssssss | None | 16 |
| 1798 | 1550 | eeeee-d10-eeeee | sssssssssssssssssss | None | 33 |
| 1799 | 1551 | eeeee-d10-eeeee | sssssssssssssssssss | None | 63 |
| 1799 | 3430 | eeeee-d10-eeeee | sssssssssssssssssss | Modified | 61 |
| 1799 | 3462 | eeeee-d12-eeeee | sssssssssssssssssssss | None | 39 |
| 1799 | 3482 | eeeee-d8-eeeee | sooosssssssssooss | None | 21 |
| 1799 | 3502 | eekk-d8-kkeee | soosssssssssooss | None | 52 |
| 1800 | 1552 | eeeee-d10-eeeee | sssssssssssssssssss | None | 22 |
| 1801 | 1553 | eeeee-d10-eeeee | sssssssssssssssssss | None | 16 |
| 1802 | 1554 | eeeee-d10-eeeee | sssssssssssssssssss | None | 33 |
| 1803 | 1555 | eeeee-d10-eeeee | sssssssssssssssssss | None | 60 |
| 1803 | 3431 | eeeee-d10-eeeee | sssssssssssssssssss | Modified | 60 |
| 1803 | 3463 | eeeee-d12-eeeee | sssssssssssssssssssss | None | 59 |
| 1803 | 3483 | eeeee-d8-eeeee | sooosssssssssooss | None | 52 |
| 1803 | 3503 | eekk-d8-kkeee | soosssssssssooss | None | 49 |
| 1803 | 3521 | eeeee-d10-eeeee | sssssssssssssssssss | None | 25 |
| 1804 | 1556 | eeeee-d10-eeeee | sssssssssssssssssss | None | 67 |
| 1805 | 1557 | eeeee-d10-eeeee | sssssssssssssssssss | None | 63 |
| 1806 | 1558 | eeeee-d10-eeeee | sssssssssssssssssss | None | 39 |
| 1807 | 1559 | eeeee-d10-eeeee | sssssssssssssssssss | None | 24 |
| 1807 | 3432 | eeeee-d10-eeeee | sssssssssssssssssss | Modified | 63 |
| 1807 | 3464 | eeeee-d12-eeeee | sssssssssssssssssssss | None | 59 |
| 1807 | 3484 | eeeee-d8-eeeee | sooosssssssssooss | None | 13 |
| 1807 | 3504 | eekk-d8-kkeee | soosssssssssooss | None | 41 |
| 1807 | 3522 | eeeee-d10-eeeee | sssssssssssssssssss | None | 1 |
| 1808 | 1560 | eeeee-d10-eeeee | sssssssssssssssssss | None | 24 |
| 1809 | 1561 | eeeee-d10-eeeee | sssssssssssssssssss | None | 9 |
| 1809 | 3433 | eeeee-d10-eeeee | sssssssssssssssssss | Modified | 64 |
| 1809 | 3465 | eeeee-d12-eeeee | sssssssssssssssssssss | None | 61 |
| 1809 | 3485 | eeeee-d8-eeeee | sooosssssssssooss | None | −17 |
| 1809 | 3505 | eekk-d8-kkeee | soosssssssssooss | None | 39 |
| 1810 | 1562 | eeeee-d10-eeeee | sssssssssssssssssss | None | 38 |
| 1811 | 1563 | eeeee-d10-eeeee | sssssssssssssssssss | None | 44 |
| 1812 | 1564 | eeeee-d10-eeeee | sssssssssssssssssss | None | −10 |
| 1813 | 1565 | eeeee-d10-eeeee | sssssssssssssssssss | None | 27 |
| 1814 | 1566 | eeeee-d10-eeeee | sssssssssssssssssss | None | 15 |
| 1815 | 1567 | eeeee-d10-eeeee | sssssssssssssssssss | None | 44 |
| 2879 | 12 | eeeee-d10-eeeee | sssssssssssssssssss | None | 40 |
| 2879 | 3417 | d20 | sssssssssssssssssss | None | 23 |
| 3008 | 13 | eeeee-d10-eeeee | sssssssssssssssssss | None | 24 |
| 3008 | 3418 | d20 | sssssssssssssssssss | None | 6 |
| 3110 | 2591 | eeeee-d10-eeeee | sssssssssssssssssss | None | 21 |
| 3111 | 2592 | eeeee-d10-eeeee | sssssssssssssssssss | None | 20 |
| 3112 | 2593 | eeeee-d10-eeeee | sssssssssssssssssss | None | 7 |
| 3112 | 3434 | eeeee-d10-eeeee | sssssssssssssssssss | Modified | 54 |
| 3112 | 3466 | eeeee-d12-eeeee | sssssssssssssssssssss | None | 58 |
| 3112 | 3486 | eeeee-d8-eeeee | sooosssssssssooss | None | 44 |
| 3112 | 3506 | eekk-d8-kkeee | soosssssssssooss | None | 51 |
| 3113 | 2594 | eeeee-d10-eeeee | sssssssssssssssssss | None | 46 |
| 3114 | 2595 | eeeee-d10-eeeee | sssssssssssssssssss | None | 29 |
| 3114 | 3435 | eeeee-d10-eeeee | sssssssssssssssssss | Modified | 70 |
| 3114 | 3467 | eeeee-d12-eeeee | sssssssssssssssssssss | None | 41 |
| 3114 | 3487 | eeeee-d8-eeeee | sooosssssssssooss | None | 45 |
| 3114 | 3507 | eekk-d8-kkeee | soosssssssssooss | None | 29 |
| 3115 | 2596 | eeeee-d10-eeeee | sssssssssssssssssss | None | 44 |
| 3116 | 2597 | eeeee-d10-eeeee | sssssssssssssssssss | None | 30 |
| 3117 | 2598 | eeeee-d10-eeeee | sssssssssssssssssss | None | 30 |
| 3118 | 2599 | eeeee-d10-eeeee | sssssssssssssssssss | None | 48 |
| 3119 | 2600 | eeeee-d10-eeeee | sssssssssssssssssss | None | 54 |
| 3120 | 2601 | eeeee-d10-eeeee | sssssssssssssssssss | None | 31 |
| 3121 | 2602 | eeeee-d10-eeeee | sssssssssssssssssss | None | 42 |
| 3122 | 2603 | eeeee-d10-eeeee | sssssssssssssssssss | None | 57 |
| 3123 | 2604 | eeeee-d10-eeeee | sssssssssssssssssss | None | 62 |
| 3124 | 2605 | eeeee-d10-eeeee | sssssssssssssssssss | None | 56 |
| 3125 | 2606 | eeeee-d10-eeeee | sssssssssssssssssss | None | −1 |
| 3125 | 3436 | eeeee-d10-eeeee | sssssssssssssssssss | Modified | 61 |
| 3125 | 3468 | eeeee-d12-eeeee | sssssssssssssssssssss | None | 55 |
| 3125 | 3488 | eeeee-d8-eeeee | sooosssssssssooss | None | 57 |
| 3125 | 3508 | eekk-d8-kkeee | soosssssssssooss | None | 60 |
| 3126 | 3395 | eeeee-d10-eeeee | sssssssssssssssssss | None | 46 |
| 3127 | 3396 | eeeee-d10-eeeee | sssssssssssssssssss | None | 55 |
| 3127 | 3437 | eeeee-d10-eeeee | sssssssssssssssssss | Modified | 77 |
| 3127 | 3469 | eeeee-d12-eeeee | sssssssssssssssssssss | None | 58 |
| 3127 | 3489 | eeeee-d8-eeeee | sooosssssssssooss | None | 54 |
| 3127 | 3509 | eekk-d8-kkeee | soosssssssssooss | None | 42 |
| 3127 | 3523 | eeeee-d10-eeeee | sssssssssssssssssss | None | 15 |
| 3128 | 3397 | eeeee-d10-eeeee | sssssssssssssssssss | None | 65 |
| 3129 | 3398 | eeeee-d10-eeeee | sssssssssssssssssss | None | 50 |
| 3130 | 3399 | eeeee-d10-eeeee | sssssssssssssssssss | None | 52 |
| 3131 | 3400 | eeeee-d10-eeeee | sssssssssssssssssss | None | 39 |
| 3132 | 3401 | eeeee-d10-eeeee | sssssssssssssssssss | None | 34 |
| 3133 | 3440 | eeeee-d10-eeeee | sssssssssssssssssss | None | 56 |
| 3134 | 3441 | eeeee-d10-eeeee | sssssssssssssssssss | None | 16 |
| 3135 | 3442 | eeeee-d10-eeeee | sssssssssssssssssss | None | 35 |
| 3136 | 3443 | eeeee-d10-eeeee | sssssssssssssssssss | None | 62 |
| 3137 | 3444 | eeeee-d10-eeeee | sssssssssssssssssss | None | 59 |
| 3138 | 3445 | eeeee-d10-eeeee | sssssssssssssssssss | None | 56 |
| 3139 | 3446 | eeeee-d10-eeeee | sssssssssssssssssss | None | 52 |
| 3140 | 3447 | eeeee-d10-eeeee | sssssssssssssssssss | None | 55 |
| 3141 | 2607 | eeeee-d10-eeeee | sssssssssssssssssss | None | 33 |
| 3142 | 2608 | eeeee-d10-eeeee | sssssssssssssssssss | None | 36 |
| 3143 | 2609 | eeeee-d10-eeeee | sssssssssssssssssss | None | 27 |
| 3144 | 2610 | eeeee-d10-eeeee | sssssssssssssssssss | None | 19 |
| 3145 | 2611 | eeeee-d10-eeeee | sssssssssssssssssss | None | 32 |
| 3146 | 2612 | eeeee-d10-eeeee | sssssssssssssssssss | None | 43 |
| 3147 | 2613 | eeeee-d10-eeeee | sssssssssssssssssss | None | 24 |
| 3148 | 2614 | eeeee-d10-eeeee | sssssssssssssssssss | None | 39 |
| 3149 | 2615 | eeeee-d10-eeeee | sssssssssssssssssss | None | 29 |
| 3150 | 2616 | eeeee-d10-eeeee | sssssssssssssssssss | None | 38 |
| 3151 | 2617 | eeeee-d10-eeeee | sssssssssssssssssss | None | 59 |
| 3152 | 2618 | eeeee-d10-eeeee | sssssssssssssssssss | None | 39 |
| 3153 | 2619 | eeeee-d10-eeeee | sssssssssssssssssss | None | 58 |
| 3154 | 2620 | eeeee-d10-eeeee | sssssssssssssssssss | None | 41 |
| 3155 | 2621 | eeeee-d10-eeeee | sssssssssssssssssss | None | 32 |
| 3156 | 2622 | eeeee-d10-eeeee | sssssssssssssssssss | None | 63 |
| 3157 | 2623 | eeeee-d10-eeeee | sssssssssssssssssss | None | 63 |
| 3158 | 2624 | eeeee-d10-eeeee | sssssssssssssssssss | None | 57 |
| 3159 | 2625 | eeeee-d10-eeeee | sssssssssssssssssss | None | 59 |
| 3160 | 2626 | eeeee-d10-eeeee | sssssssssssssssssss | None | 65 |
| 3161 | 2627 | eeeee-d10-eeeee | sssssssssssssssssss | None | 45 |
| 3162 | 2628 | eeeee-d10-eeeee | sssssssssssssssssss | None | 37 |
| 3162 | 3438 | eeeee-d10-eeeee | sssssssssssssssssss | Modified | 22 |
| 3162 | 3470 | eeeee-d12-eeeee | sssssssssssssssssssss | None | 48 |
| 3162 | 3490 | eeeee-d8-eeeee | sooosssssssssooss | None | 29 |
| 3162 | 3510 | eekk-d8-kkeee | soosssssssssooss | None | 35 |
| 3162 | 3524 | eeeee-d10-eeeee | sssssssssssssssssss | None | 7 |
| 3163 | 2629 | eeeee-d10-eeeee | sssssssssssssssssss | None | 60 |
| 3164 | 2630 | eeeee-d10-eeeee | sssssssssssssssssss | None | 52 |
| 3165 | 2631 | eeeee-d10-eeeee | sssssssssssssssssss | None | 52 |
| 3166 | 3448 | eeeee-d10-eeeee | sssssssssssssssssss | None | 31 |
| 3167 | 3449 | eeeee-d10-eeeee | sssssssssssssssssss | None | 49 |
| 3168 | 15 | eeeee-d10-eeeee | sssssssssssssssssss | None | 33 |
| 3168 | 3419 | d20 | sssssssssssssssssss | None | 22 |
| 3169 | 3450 | eeeee-d10-eeeee | sssssssssssssssssss | None | 26 |
| 3170 | 3451 | eeeee-d10-eeeee | sssssssssssssssssss | None | 34 |
| 3171 | 3402 | eeeee-d10-eeeee | sssssssssssssssssss | None | 54 |
| 3171 | 3439 | eeeee-d10-eeeee | sssssssssssssssssss | Modified | 69 |
| 3171 | 3471 | eeeee-d12-eeeee | sssssssssssssssssssss | None | 50 |
| 3171 | 3491 | eeeee-d8-eeeee | sooosssssssssooss | None | 41 |
| 3171 | 3511 | eekk-d8-kkeee | soosssssssssooss | None | 32 |
| 3171 | 3525 | eeeee-d10-eeeee | sssssssssssssssssss | None | 16 |

[0472] Table 7 below shows the percent knockdown of KCNT1 in BE(2)-M17 cells after treatment with the ASO with the sequence of a corresponding SEQ ID NO.

TABLE 7
Percent Knock down of KCNT1 expressed in human BE(2)-M17 cells
organized according to SEQ ID NO.

| | BE(2)-M17 |
|---|---|
| | 100 nM ASO |
| SED ID NO: | Mean |
| 1 | 7 |
| 4 | 44 |
| 5 | 36 |
| 6 | 31 |
| 8 | 25 |
| 10 | 53 |
| 12 | 40 |
| 13 | 24 |
| 15 | 33 |
| 17 | 32 |
| 28 | 49 |
| 29 | 51 |
| 62 | 49 |
| 625 | 11 |
| 626 | 34 |
| 627 | 37 |
| 628 | 51 |
| 629 | 44 |
| 630 | 43 |
| 631 | 33 |
| 632 | 5 |
| 633 | 34 |
| 634 | 37 |
| 635 | 35 |
| 636 | 40 |
| 637 | 30 |
| 638 | 17 |
| 639 | 26 |
| 640 | 49 |
| 641 | 38 |
| 642 | 56 |
| 643 | 48 |
| 644 | 21 |
| 645 | 50 |
| 646 | 64 |
| 647 | 39 |
| 648 | 41 |
| 649 | 52 |
| 1195 | 49 |
| 1196 | 51 |
| 1197 | 41 |
| 1198 | 33 |
| 1199 | 38 |
| 1200 | 14 |
| 1201 | 11 |
| 1202 | 24 |
| 1203 | 41 |
| 1204 | 44 |
| 1205 | 65 |
| 1206 | 56 |
| 1207 | 55 |
| 1208 | 21 |
| 1209 | 45 |
| 1210 | 41 |
| 1211 | 52 |
| 1212 | 54 |
| 1213 | 41 |
| 1214 | 41 |
| 1215 | 11 |
| 1216 | 22 |
| 1217 | 32 |
| 1218 | 50 |
| 1219 | 38 |
| 1220 | 34 |
| 1221 | 25 |
| 1222 | 20 |
| 1223 | −3 |
| 1224 | 62 |
| 1496 | 45 |
| 1497 | 64 |
| 1498 | 67 |
| 1499 | 44 |
| 1500 | 42 |
| 1501 | 21 |
| 1502 | 32 |
| 1503 | 30 |
| 1504 | 46 |
| 1505 | 54 |
| 1506 | 46 |
| 1507 | 47 |
| 1508 | 54 |
| 1509 | 43 |
| 1510 | 72 |
| 1511 | 44 |
| 1512 | 36 |
| 1513 | 35 |
| 1514 | 44 |
| 1515 | 11 |
| 1516 | 28 |
| 1517 | 28 |
| 1518 | 26 |
| 1519 | 35 |
| 1520 | 46 |
| 1521 | 31 |
| 1522 | 42 |
| 1523 | 21 |
| 1524 | 12 |
| 1525 | −4 |
| 1526 | 31 |
| 1527 | 25 |
| 1528 | 36 |
| 1529 | 36 |
| 1530 | 52 |
| 1531 | 54 |
| 1532 | 22 |
| 1533 | 63 |
| 1534 | 63 |
| 1535 | 34 |
| 1536 | 17 |
| 1537 | 24 |
| 1538 | 40 |
| 1539 | 53 |
| 1540 | 46 |
| 1541 | 46 |
| 1542 | 71 |
| 1543 | 41 |
| 1544 | 34 |
| 1545 | 38 |
| 1546 | 52 |
| 1547 | 58 |
| 1548 | 40 |
| 1549 | 16 |
| 1550 | 33 |
| 1551 | 63 |
| 1552 | 22 |
| 1553 | 16 |
| 1554 | 33 |
| 1555 | 60 |
| 1556 | 67 |
| 1557 | 63 |
| 1558 | 39 |
| 1559 | 24 |
| 1560 | 24 |
| 1561 | 9 |
| 1562 | 38 |
| 1563 | 44 |
| 1564 | −10 |
| 1565 | 27 |
| 1566 | 15 |
| 1567 | 44 |
| 2591 | 21 |
| 2592 | 20 |
| 2593 | 7 |
| 2594 | 46 |
| 2595 | 29 |
| 2596 | 44 |
| 2597 | 30 |
| 2598 | 30 |
| 2599 | 48 |
| 2600 | 54 |
| 2601 | 31 |
| 2602 | 42 |
| 2603 | 57 |
| 2604 | 62 |
| 2605 | 56 |
| 2606 | −1 |
| 2607 | 33 |
| 2608 | 36 |
| 2609 | 27 |
| 2610 | 19 |
| 2611 | 32 |
| 2612 | 43 |
| 2613 | 24 |
| 2614 | 39 |
| 2615 | 29 |
| 2616 | 38 |
| 2617 | 59 |
| 2618 | 39 |
| 2619 | 58 |
| 2620 | 41 |
| 2621 | 32 |
| 2622 | 63 |
| 2623 | 63 |
| 2624 | 57 |
| 2625 | 59 |
| 2626 | 65 |
| 2627 | 45 |
| 2628 | 37 |
| 2629 | 60 |
| 2630 | 52 |
| 2631 | 52 |
| 3395 | 46 |
| 3396 | 55 |
| 3397 | 65 |
| 3398 | 50 |
| 3399 | 52 |
| 3400 | 39 |
| 3401 | 34 |
| 3402 | 54 |
| 3410 | 14 |
| 3411 | 39 |
| 3412 | 45 |
| 3413 | 40 |
| 3414 | 35 |
| 3415 | 32 |
| 3416 | 45 |
| 3417 | 23 |
| 3418 | 6 |
| 3419 | 22 |
| 3420 | 49 |
| 3421 | 59 |
| 3422 | 59 |
| 3423 | 60 |
| 3424 | 63 |
| 3425 | 62 |
| 3426 | 17 |
| 3427 | 39 |
| 3428 | 79 |
| 3429 | 59 |
| 3430 | 61 |
| 3431 | 60 |
| 3432 | 63 |
| 3433 | 64 |
| 3434 | 54 |
| 3435 | 70 |
| 3436 | 61 |
| 3437 | 77 |
| 3438 | 22 |
| 3439 | 69 |
| 3440 | 56 |
| 3441 | 16 |
| 3442 | 35 |
| 3443 | 62 |
| 3444 | 59 |
| 3445 | 56 |
| 3446 | 52 |
| 3447 | 55 |
| 3448 | 31 |
| 3449 | 49 |
| 3450 | 26 |
| 3451 | 34 |
| 3452 | 39 |
| 3453 | 41 |
| 3454 | 37 |
| 3455 | 49 |
| 3456 | 43 |
| 3457 | 59 |
| 3458 | 44 |
| 3459 | 69 |
| 3460 | 61 |
| 3461 | 25 |
| 3462 | 39 |
| 3463 | 59 |
| 3464 | 59 |
| 3465 | 61 |
| 3466 | 58 |
| 3467 | 41 |
| 3468 | 55 |
| 3469 | 58 |
| 3470 | 48 |
| 3471 | 50 |
| 3472 | 38 |
| 3473 | 19 |
| 3474 | 25 |
| 3475 | 51 |
| 3476 | 18 |
| 3477 | 34 |
| 3478 | 41 |
| 3479 | 41 |
| 3480 | 49 |
| 3481 | 52 |
| 3482 | 21 |
| 3483 | 52 |
| 3484 | 13 |
| 3485 | −17 |
| 3486 | 44 |
| 3487 | 45 |
| 3488 | 57 |
| 3489 | 54 |
| 3490 | 29 |
| 3491 | 41 |
| 3492 | 40 |
| 3493 | 52 |
| 3494 | 26 |
| 3495 | 53 |
| 3496 | 50 |
| 3497 | 37 |
| 3498 | 26 |
| 3499 | 42 |
| 3500 | 37 |
| 3501 | 42 |
| 3502 | 52 |
| 3503 | 49 |
| 3504 | 41 |
| 3505 | 39 |
| 3506 | 51 |
| 3507 | 29 |
| 3508 | 60 |
| 3509 | 42 |
| 3510 | 35 |
| 3511 | 32 |
| 3512 | 6 |
| 3513 | 5 |
| 3514 | 14 |
| 3515 | 4 |
| 3516 | 11 |
| 3517 | 33 |
| 3518 | 39 |
| 3519 | 15 |
| 3520 | −1 |
| 3521 | 25 |
| 3522 | 1 |
| 3523 | 15 |
| 3524 | 7 |
| 3525 | 16 |

### Example 4. Evaluation of Select Antisense Oligonucleotides

[0473] For select ASOs, the degree of KCNT1 mRNA knock-down was determined using a taqman quantitative polymerase chain reaction (qPCR assay). Human (SH-Sy5Y) neuronal cell lines were transfected with between 500 nM and 10,000 nM ASO using the Amaxa nucleofection (protocol CA137). After 48 hour incubation at 37° C., cDNA was prepared from each well using the Cell-to-Ct Kit (ThermoFisher Scientific). The expression level of KCNT1 was determined using taqman qPCR assays for either KCNT1 (human Hs.PT.58.19442766) or the housekeeping gene HPRT1 (human Hs.PT.58v.45621572). All taqman assays were predesigned by Integrated DNA Technologies. KCNT1 and HPRT1 detection were multiplexed in a single well. The fold change in KCNT1 was calculated using the ΔΔCp method whereby the expression of KCNT1 is first normalized to HPRT1 (2^{-(Cp_KCNT1-Cp_HPRT1)}) in the same well (multiplexed reaction) followed by a secondary normalization to the vehicle, non-transfected control (2^{-(Cp_ASO-Cp_vehicle)}). The assay was performed in biological duplicates and technical triplicates.

[0474] FIG. 1 is a plot demonstrating percentage knockdown of hKCNT1 in response to different antisense oligonucleotide treatments (specifically, antisense oligonucleotides corresponding to SEQ ID NO: 4, SEQ ID NO: 5, SEQ ID NO: 7, SEQ ID NO: 751, SEQ ID NO: 759, SEQ ID NO: 1206, and SEQ ID NO: 1546). The numerical percentage knockdown values are shown below in Table 8. The positive control is SEQ ID NO: 7. The negative control is an ASO with identical chemistry but with a sequence not found in the human genome.

TABLE 8
Percent knockdown data expressed as average percent knock-down.

| | % Knockdown | | | | | | | |
|---|---|---|---|---|---|---|---|---|
| | SEQ ID NO | | | | | | Pos | Neg |
| ASO μM | 4 | 5 | 751 | 759 | 1206 | 1546 | Control | Control |
| 0.5 | 36.55 | 13.42 | 7.09 | 12.03 | 18.95 | 25.50 | −27.31 | −98.79 |
| 1 | 61.60 | 36.27 | 24.74 | 25.59 | 26.96 | 42.66 | 7.02 | −98.58 |
| 2 | 85.97 | 55.76 | 42.84 | 43.51 | 46.64 | 69.39 | 27.66 | −98.69 |
| 5 | 94.33 | 79.72 | 62.23 | 73.50 | 70.44 | 84.36 | 74.18 | −98.69 |
| 10 | 98.61 | 84.89 | 76.00 | 87.23 | 84.34 | 94.51 | 88.02 | −98.81 |

All ASO's tested exhibited a dose dependent knock down of the KCNT1 expression.

ASOs as shown in SEQ ID NO. 4 and 1546 exhibited the most potent knockdown of the KCNT1 gene, with greater than 80% gene expression reduction when treated with 5 μM of the ASO oligonucleotide. The IC50 of each ASO is shown in Table 9.

TABLE 9
IC50 of select ASOs in SH-SY5Y neuronal cells

| | SH-SY5Y Cells |
|---|---|
| SEQ ID NO. | IC50 (uM) |
| 4 | 0.716 |
| 5 | 1.733 |
| 7 | 3.218 |
| 751 | 3.041 |
| 759 | 2.342 |
| 1206 | 2.255 |
| 1546 | 1.177 |

### OTHER EMBODIMENTS

[0475] All publications, patents, and patent applications mentioned in this specification are incorporated herein by reference in their entirety to the same extent as if each individual publication, patent, or patent application was specifically and individually indicated to be incorporated by reference in its entirety. Where a term in the present application is found to be defined differently in a document incorporated herein by reference, the definition provided herein is to serve as the definition for the term.

[0476] While the invention has been described in connection with specific embodiments thereof, it will be understood that invention is capable of further modifications and this application is intended to cover any variations, uses, or adaptations of the invention following, in general, the principles of the invention and including such departures from the present disclosure that come within known or customary practice within the art to which the invention pertains and may be applied to the essential features hereinbefore set forth, and follows in the scope of the claimed.

The application's sequence listing, which the Patent Office published only in electronic form, follows.

SEQUENCE LISTING (3538 sequences)

SEQ ID NO: 1 - DNA, 20 bp, Artificial Sequence
  source: /note="Description of Artificial Sequence: Synthetic oligonucleotide"
tgatgaagaacagcttgagc

SEQ ID NO: 2 - DNA, 20 bp, Artificial Sequence
  source: /note="Description of Artificial Sequence: Synthetic oligonucleotide"
agggagaagttgaacagccg

SEQ ID NO: 3 - DNA, 20 bp, Artificial Sequence
  source: /note="Description of Artificial Sequence: Synthetic oligonucleotide"
agccccagcatccgatgccc

SEQ ID NO: 4 - DNA, 20 bp, Artificial Sequence
  source: /note="Description of Artificial Sequence: Synthetic oligonucleotide"
gttgcctttgtagctgaggt

SEQ ID NO: 5 - DNA, 20 bp, Artificial Sequence
  source: /note="Description of Artificial Sequence: Synthetic oligonucleotide"
gggatgaacaggttccgcag

SEQ ID NO: 6 - DNA, 20 bp, Artificial Sequence
  source: /note="Description of Artificial Sequence: Synthetic oligonucleotide"
aggatggcacggtggaagtc

SEQ ID NO: 7 - DNA, 20 bp, Artificial Sequence
  source: /note="Description of Artificial Sequence: Synthetic oligonucleotide"
gcagaagtagaaggaggtca

SEQ ID NO: 8 - DNA, 20 bp, Artificial Sequence
  source: /note="Description of Artificial Sequence: Synthetic oligonucleotide"
tagatgacccgctgggacca

SEQ ID NO: 9 - DNA, 20 bp, Artificial Sequence
  source: /note="Description of Artificial Sequence: Synthetic oligonucleotide"
gtccatcttggctcgcatga

SEQ ID NO: 10 - DNA, 20 bp, Artificial Sequence
  source: /note="Description of Artificial Sequence: Synthetic oligonucleotide"
gccgggcagatgcagttcag

SEQ ID NO: 11 - DNA, 20 bp, Artificial Sequence
  source: /note="Description of Artificial Sequence: Synthetic oligonucleotide"
gggacgtgtgcaccagcagg

SEQ ID NO: 12 - DNA, 20 bp, Artificial Sequence
  source: /note="Description of Artificial Sequence: Synthetic oligonucleotide"
gagccagagagtagctgtcc

SEQ ID NO: 13 - DNA, 20 bp, Artificial Sequence
  source: /note="Description of Artificial Sequence: Synthetic oligonucleotide"
tcacgaaggactggtagagc

SEQ ID NO: 14 - DNA, 20 bp, Artificial Sequence
  source: /note="Description of Artificial Sequence: Synthetic oligonucleotide"
tgatggtgatcatgtagtcc

SEQ ID NO: 15 - DNA, 20 bp, Artificial Sequence
  source: /note="Description of Artificial Sequence: Synthetic oligonucleotide"
atggggatctcggcgctgga

SEQ ID NO: 16 - DNA, 20 bp, Artificial Sequence
  source: /note="Description of Artificial Sequence: Synthetic oligonucleotide"
tgtgcttgcagcccttgtcc

SEQ ID NO: 17 - DNA, 20 bp, Artificial Sequence
  source: /note="Description of Artificial Sequence: Synthetic oligonucleotide"
tgtcacccatgcggatgtgg

SEQ ID NO: 18 - DNA, 20 bp, Artificial Sequence
  source: /note="Description of Artificial Sequence: Synthetic oligonucleotide"
tgtccccatggaggcgatga

SEQ ID NO: 19 - DNA, 20 bp, Artificial Sequence
  source: /note="Description of Artificial Sequence: Synthetic oligonucleotide"
tgacgtagaactccacctgg

SEQ ID NO: 20 - DNA, 20 bp, Artificial Sequence
  source: /note="Description of Artificial Sequence: Synthetic oligonucleotide"
gctcgatctttggtttttga

SEQ ID NO: 21 - DNA, 20 bp, Artificial Sequence
  source: /note="Description of Artificial Sequence: Synthetic oligonucleotide"
ggccagccagcagttcagaa

SEQ ID NO: 22 - DNA, 20 bp, Artificial Sequence
  source: /note="Description of Artificial Sequence: Synthetic oligonucleotide"
ggccagatcttgggcgtgac

SEQ ID NO: 23 - DNA, 20 bp, Artificial Sequence
  source: /note="Description of Artificial Sequence: Synthetic oligonucleotide"
cacaggaccacgtgcttctc

SEQ ID NO: 24 - DNA, 20 bp, Artificial Sequence
  source: /note="Description of Artificial Sequence: Synthetic oligonucleotide"
actcgttcaggaagtccatg

SEQ ID NO: 25 - DNA, 20 bp, Artificial Sequence
  source: /note="Description of Artificial Sequence: Synthetic oligonucleotide"
tgaccacgtaatagtcctgg

SEQ ID NO: 26 - DNA, 20 bp, Artificial Sequence
  source: /note="Description of Artificial Sequence: Synthetic oligonucleotide"
acctcgttcctgctgctgag

SEQ ID NO: 27 - DNA, 20 bp, Artificial Sequence
  source: /note="Description of Artificial Sequence: Synthetic oligonucleotide"
tgaggatctggacgtagagg

SEQ ID NO: 28 - DNA, 20 bp, Artificial Sequence
  source: /note="Description of Artificial Sequence: Synthetic oligonucleotide"
atgcggatgtggtacacctc

SEQ ID NO: 29 - DNA, 20 bp, Artificial Sequence
  source: /note="Description of Artificial Sequence: Synthetic oligonucleotide"
gaagctcttgccctcgtact

SEQ ID NO: 30 - DNA, 20 bp, Artificial Sequence
  source: /note="Description of Artificial Sequence: Synthetic oligonucleotide"
gttgatgtagaagcaggtgt

SEQ ID NO: 31 - DNA, 20 bp, Artificial Sequence
  source: /note="Description of Artificial Sequence: Synthetic oligonucleotide"
ttgttcttgaacccgtaggc

SEQ ID NO: 32 - DNA, 20 bp, Artificial Sequence
  source: /note="Description of Artificial Sequence: Synthetic oligonucleotide"
tggtctgcacgttgacgatg

SEQ ID NO: 33 - DNA, 20 bp, Artificial Sequence
  source: /note="Description of Artificial Sequence: Synthetic oligonucleotide"
ctggggaagagccggaacat

SEQ ID NO: 34 - DNA, 20 bp, Artificial Sequence
  source: /note="Description of Artificial Sequence: Synthetic oligonucleotide"
atgttggaagggtgggtgag

SEQ ID NO: 35 - DNA, 20 bp, Artificial Sequence
  source: /note="Description of Artificial Sequence: Synthetic oligonucleotide"
ttggcgcggaactgcatgaa

SEQ ID NO: 36 - DNA, 20 bp, Artificial Sequence
  source: /note="Description of Artificial Sequence: Synthetic oligonucleotide"
gatctgggactgggctctga

SEQ ID NO: 37 - DNA, 20 bp, Artificial Sequence
  source: /note="Description of Artificial Sequence: Synthetic oligonucleotide"
gttgtcctcccgcttcagcc

SEQ ID NO: 38 - DNA, 20 bp, Artificial Sequence
  source: /note="Description of Artificial Sequence: Synthetic oligonucleotide"
ggtcttggcgtccgccatgt

SEQ ID NO: 39 - DNA, 20 bp, Artificial Sequence
  source: /note="Description of Artificial Sequence: Synthetic oligonucleotide"
gtcatctttctctccaccca

SEQ ID NO: 40 - DNA, 20 bp, Artificial Sequence
  source: /note="Description of Artificial Sequence: Synthetic oligonucleotide"
atctccaggacgaaggacac

SEQ ID NO: 41 - DNA, 20 bp, Artificial Sequence
  source: /note="Description of Artificial Sequence: Synthetic oligonucleotide"
tcgtgatgatgaagggcaga

SEQ ID NO: 42 - DNA, 20 bp, Artificial Sequence
  source: /note="Description of Artificial Sequence: Synthetic oligonucleotide"
gaggatgaggacctggttga

SEQ ID NO: 43 - DNA, 20 bp, Artificial Sequence
  source: /note="Description of Artificial Sequence: Synthetic oligonucleotide"
aaaacgaggcacagcagggt

SEQ ID NO: 44 - DNA, 20 bp, Artificial Sequence
  source: /note="Description of Artificial Sequence: Synthetic oligonucleotide"
cagcaggatgctcttgttgt

SEQ ID NO: 45 - DNA, 20 bp, Artificial Sequence
  source: /note="Description of Artificial Sequence: Synthetic oligonucleotide"
cgagttctcctccttggtga

SEQ ID NO: 46 - DNA, 20 bp, Artificial Sequence
  source: /note="Description of Artificial Sequence: Synthetic oligonucleotide"
cgcttctcctcctgcttgaa

SEQ ID NO: 47 - DNA, 20 bp, Artificial Sequence
  source: /note="Description of Artificial Sequence: Synthetic oligonucleotide"
ttgggagggtagcccttcac

SEQ ID NO: 48 - DNA, 20 bp, Artificial Sequence
  source: /note="Description of Artificial Sequence: Synthetic oligonucleotide"
ttcatggcacagaggtaccc

SEQ ID NO: 49 - DNA, 20 bp, Artificial Sequence
  source: /note="Description of Artificial Sequence: Synthetic oligonucleotide"
gttcttcaccagctcggaga

SEQ ID NO: 50 - DNA, 20 bp, Artificial Sequence
  source: /note="Description of Artificial Sequence: Synthetic oligonucleotide"
cggatgagatagacaatgtc

SEQ ID NO: 51 - DNA, 20 bp, Artificial Sequence
  source: /note="Description of Artificial Sequence: Synthetic oligonucleotide"
catcgtctccaggaagctta

SEQ ID NO: 52 - DNA, 20 bp, Artificial Sequence
  source: /note="Description of Artificial Sequence: Synthetic oligonucleotide"
gcccatacatgcgctgccac

SEQ ID NO: 53 - DNA, 20 bp, Artificial Sequence
  source: /note="Description of Artificial Sequence: Synthetic oligonucleotide"
ctccaggaagcttattatgg

SEQ ID NO: 54 - DNA, 20 bp, Artificial Sequence
  source: /note="Description of Artificial Sequence: Synthetic oligonucleotide"
gtcgatcttgagggagctga

SEQ ID NO: 55 - DNA, 20 bp, Artificial Sequence
  source: /note="Description of Artificial Sequence: Synthetic oligonucleotide"
acttgcactcctcctcacac

SEQ ID NO: 56 - DNA, 20 bp, Artificial Sequence
  source: /note="Description of Artificial Sequence: Synthetic oligonucleotide"
acttcttgtgggcgtggaag

SEQ ID NO: 57 - DNA, 20 bp, Artificial Sequence
  source: /note="Description of Artificial Sequence: Synthetic oligonucleotide"
gcgtcttcatagctgttgtg

SEQ ID NO: 58 - DNA, 20 bp, Artificial Sequence
  source: /note="Description of Artificial Sequence: Synthetic oligonucleotide"
tctcggaggacgagtcattg

SEQ ID NO: 59 - DNA, 20 bp, Artificial Sequence
  source: /note="Description of Artificial Sequence: Synthetic oligonucleotide"
acggtggagaaggtgacgat

SEQ ID NO: 60 - DNA, 20 bp, Artificial Sequence
  source: /note="Description of Artificial Sequence: Synthetic oligonucleotide"
tagacgagctcctcgaactg

SEQ ID NO: 61 - DNA, 20 bp, Artificial Sequence
  source: /note="Description of Artificial Sequence: Synthetic oligonucleotide"
agggatctgcaggactctgc

SEQ ID NO: 62 - DNA, 20 bp, Artificial Sequence
  source: /note="Description of Artificial Sequence: Synthetic oligonucleotide"
cgcggaagaacttgctgtca

SEQ ID NO: 63 - DNA, 20 bp, Artificial Sequence
  source: /note="Description of Artificial Sequence: Synthetic oligonucleotide"
tctctgccgagacgatgatc

SEQ ID NO: 64 - DNA, 20 bp, Artificial Sequence
  source: /note="Description of Artificial Sequence: Synthetic oligonucleotide"
ttgcgggatctgtagtaggc

SEQ ID NO: 65 - DNA, 20 bp, Artificial Sequence
  source: /note="Description of Artificial Sequence: Synthetic oligonucleotide"
acaggtcgccctcggtgatt

SEQ ID NO: 66 - DNA, 20 bp, Artificial Sequence
  source: /note="Description of Artificial Sequence: Synthetic oligonucleotide"
ttcccgtgtgtcctcacagt

SEQ ID NO: 67 - DNA, 20 bp, Artificial Sequence
  source: /note="Description of Artificial Sequence: Synthetic oligonucleotide"
acgagggccacgcagatcat

SEQ ID NO: 68 - DNA, 20 bp, Artificial Sequence
  source: /note="Description of Artificial Sequence: Synthetic oligonucleotide"
cgctccctcttttctagttt

SEQ ID NO: 69 - DNA, 20 bp, Artificial Sequence
  source: /note="Description of Artificial Sequence: Synthetic oligonucleotide"
gctctctgtccggtagatgc

SEQ ID NO: 70 - DNA, 20 bp, Artificial Sequence
  source: /note="Description of Artificial Sequence: Synthetic oligonucleotide"
gacgtaggagagggtgttct

SEQ ID NO: 71 - DNA, 20 bp, Artificial Sequence
  source: /note="Description of Artificial Sequence: Synthetic oligonucleotide"
aaggagtagttctgctttgg

SEQ ID NO: 72 - DNA, 20 bp, Artificial Sequence
  source: /note="Description of Artificial Sequence: Synthetic oligonucleotide"
ggtcaggagggacaggttct

SEQ ID NO: 73 - DNA, 20 bp, Artificial Sequence
  source: /note="Description of Artificial Sequence: Synthetic oligonucleotide"
cgcaggatggtctggtggtc

SEQ ID NO: 74 - DNA, 20 bp, Artificial Sequence
  source: /note="Description of Artificial Sequence: Synthetic oligonucleotide"
tccgaggtggagaagacgtg

SEQ ID NO: 75 - DNA, 20 bp, Artificial Sequence
  source: /note="Description of Artificial Sequence: Synthetic oligonucleotide"
ctttccagggtggagtccca

SEQ ID NO: 76 - DNA, 20 bp, Artificial Sequence
  source: /note="Description of Artificial Sequence: Synthetic oligonucleotide"
aaaactctcctcactagcct

SEQ ID NO: 77 - DNA, 20 bp, Artificial Sequence
  source: /note="Description of Artificial Sequence: Synthetic oligonucleotide"
tggcgtacttgcactcctcc

SEQ ID NO: 78 - DNA, 20 bp, Artificial Sequence
  source: /note="Description of Artificial Sequence: Synthetic oligonucleotide"
tagtgccaccgtgtcctcac

SEQ ID NO: 79 - DNA, 20 bp, Artificial Sequence
  source: /note="Description of Artificial Sequence: Synthetic oligonucleotide"
ctctcacatgcccggcttcc

SEQ ID NO: 80 - DNA, 20 bp, Artificial Sequence
  source: /note="Description of Artificial Sequence: Synthetic oligonucleotide"
gtgcggtccacctcgttcct

SEQ ID NO: 81 - DNA, 20 bp, Artificial Sequence
  source: /note="Description of Artificial Sequence: Synthetic oligonucleotide"
tcttccgcttctcctcctgc

SEQ ID NO: 82 - DNA, 20 bp, Artificial Sequence
  source: /note="Description of Artificial Sequence: Synthetic oligonucleotide"
tggcgtcttctgcttccttc

SEQ ID NO: 83 - DNA, 20 bp, Artificial Sequence
  source: /note="Description of Artificial Sequence: Synthetic oligonucleotide"
aatgcaccatcttccgccca

SEQ ID NO: 84 - DNA, 20 bp, Artificial Sequence
  source: /note="Description of Artificial Sequence: Synthetic oligonucleotide"
agtagagtgtgccatcccca

SEQ ID NO: 85 - DNA, 20 bp, Artificial Sequence
  source: /note="Description of Artificial Sequence: Synthetic oligonucleotide"
taggccttggcgtcttcata

SEQ ID NO: 86 - DNA, 20 bp, Artificial Sequence
  source: /note="Description of Artificial Sequence: Synthetic oligonucleotide"
cggaccctcgtgcagcccct

SEQ ID NO: 87 - DNA, 20 bp, Artificial Sequence
  source: /note="Description of Artificial Sequence: Synthetic oligonucleotide"
gtcaccgtagcccacggtgg

SEQ ID NO: 88 - DNA, 20 bp, Artificial Sequence
  source: /note="Description of Artificial Sequence: Synthetic oligonucleotide"
gccccagcatccgatgccca

SEQ ID NO: 89 - DNA, 20 bp, Artificial Sequence
  source: /note="Description of Artificial Sequence: Synthetic oligonucleotide"
tctgagttgggtgtggccca

SEQ ID NO: 90 - DNA, 20 bp, Artificial Sequence
  source: /note="Description of Artificial Sequence: Synthetic oligonucleotide"
ggaaatggcgtcttctgctt

SEQ ID NO: 91 - DNA, 20 bp, Artificial Sequence
  source: /note="Description of Artificial Sequence: Synthetic oligonucleotide"
aggtaagtgtaaaatggtcc

SEQ ID NO: 92 - DNA, 20 bp, Artificial Sequence
  source: /note="Description of Artificial Sequence: Synthetic oligonucleotide"
ggaggctgaattgtgcttca

SEQ ID NO: 93 - DNA, 20 bp, Artificial Sequence
  source: /note="Description of Artificial Sequence: Synthetic oligonucleotide"
gggatctcgccttgctgaga

SEQ ID NO: 94 - DNA, 20 bp, Artificial Sequence
  source: /note="Description of Artificial Sequence: Synthetic oligonucleotide"
aaccagcagcaaaggacgca

SEQ ID NO: 95 - DNA, 20 bp, Artificial Sequence
  source: /note="Description of Artificial Sequence: Synthetic oligonucleotide"
acttcatgcctccagaatgc

SEQ ID NO: 96 - DNA, 20 bp, Artificial Sequence
  source: /note="Description of Artificial Sequence: Synthetic oligonucleotide"
accctgtcgtcgttctggaa

SEQ ID NO: 97 - DNA, 20 bp, Artificial Sequence
  source: /note="Description of Artificial Sequence: Synthetic oligonucleotide"
tagtactggtctcacctccc

SEQ ID NO: 98 - DNA, 20 bp, Artificial Sequence
  source: /note="Description of Artificial Sequence: Synthetic oligonucleotide"
tgaggctgcccttgccatca

SEQ ID NO: 99 - DNA, 20 bp, Artificial Sequence
  source: /note="Description of Artificial Sequence: Synthetic oligonucleotide"
acttagcccacttcccactg

SEQ ID NO: 100 - DNA, 20 bp, Artificial Sequence
  source: /note="Description of Artificial Sequence: Synthetic oligonucleotide"
gtccaggctgtgcccacttc

SEQ ID NO: 101 - DNA, 20 bp, Artificial Sequence
  source: /note="Description of Artificial Sequence: Synthetic oligonucleotide"
cttggctggtccttctcaca

SEQ ID NO: 102 - DNA, 20 bp, Artificial Sequence
  source: /note="Description of Artificial Sequence: Synthetic oligonucleotide"
agttcagtcctggcccatca

SEQ ID NO: 103 - DNA, 20 bp, Artificial Sequence
  source: /note="Description of Artificial Sequence: Synthetic oligonucleotide"
tatcacttgtccccttgcct

SEQ ID NO: 104 - DNA, 20 bp, Artificial Sequence
  source: /note="Description of Artificial Sequence: Synthetic oligonucleotide"
tactgccacaccaggctcgt

SEQ ID NO: 105 - DNA, 20 bp, Artificial Sequence
  source: /note="Description of Artificial Sequence: Synthetic oligonucleotide"
agccccgctggctcacttcc

SEQ ID NO: 106 - DNA, 20 bp, Artificial Sequence
  source: /note="Description of Artificial Sequence: Synthetic oligonucleotide"
cgtaccctgagctgccatca

SEQ ID NO: 107 - DNA, 20 bp, Artificial Sequence
  source: /note="Description of Artificial Sequence: Synthetic oligonucleotide"
gtgtccctcgtgccccaccc

SEQ ID NO: 108 - DNA, 20 bp, Artificial Sequence
  source: /note="Description of Artificial Sequence: Synthetic oligonucleotide"
ggtctcaaggcacttccccg

SEQ ID NO: 109 - DNA, 20 bp, Artificial Sequence
  source: /note="Description of Artificial Sequence: Synthetic oligonucleotide"
cctcaccacgtgtggtcccc

SEQ ID NO: 110 - DNA, 20 bp, Artificial Sequence
  source: /note="Description of Artificial Sequence: Synthetic oligonucleotide"
caggtccactcccatccttc

SEQ ID NO: 111 - DNA, 20 bp, Artificial Sequence
  source: /note="Description of Artificial Sequence: Synthetic oligonucleotide"
caggcttcggcctcactcac

SEQ ID NO: 112 - DNA, 20 bp, Artificial Sequence
  source: /note="Description of Artificial Sequence: Synthetic oligonucleotide"
aagcggcacttccaccttac

SEQ ID NO: 113 - DNA, 20 bp, Artificial Sequence
  source: /note="Description of Artificial Sequence: Synthetic oligonucleotide"
gatgaggccttggtgtcctc

SEQ ID NO: 114 - DNA, 20 bp, Artificial Sequence
  source: /note="Description of Artificial Sequence: Synthetic oligonucleotide"
ggtctcccaaggccctcctc

SEQ ID NO: 115 - DNA, 20 bp, Artificial Sequence
  source: /note="Description of Artificial Sequence: Synthetic oligonucleotide"
cgaggctgtccccttgtctc

SEQ ID NO: 116 - DNA, 20 bp, Artificial Sequence
  source: /note="Description of Artificial Sequence: Synthetic oligonucleotide"
ccttggcatatgccctcatc

SEQ ID NO: 117 - DNA, 20 bp, Artificial Sequence
  source: /note="Description of Artificial Sequence: Synthetic oligonucleotide"
ttcttccctcgcgttgccct

SEQ ID NO: 118 - DNA, 20 bp, Artificial Sequence
  source: /note="Description of Artificial Sequence: Synthetic oligonucleotide"
cttcttccctcgcgttgccc

SEQ ID NO: 119 - DNA, 20 bp, Artificial Sequence
  source: /note="Description of Artificial Sequence: Synthetic oligonucleotide"
ccttcttccctcgcgttgcc

SEQ ID NO: 120 - DNA, 20 bp, Artificial Sequence
  source: /note="Description of Artificial Sequence: Synthetic oligonucleotide"
accttcttccctcgcgttgc

SEQ ID NO: 121 - DNA, 20 bp, Artificial Sequence
  source: /note="Description of Artificial Sequence: Synthetic oligonucleotide"
caccttcttccctcgcgttg

SEQ ID NO: 122 - DNA, 20 bp, Artificial Sequence
  source: /note="Description of Artificial Sequence: Synthetic oligonucleotide"
ccaccttcttccctcgcgtt

SEQ ID NO: 123 - DNA, 20 bp, Artificial Sequence
  source: /note="Description of Artificial Sequence: Synthetic oligonucleotide"
gccaccttcttccctcgcgt

SEQ ID NO: 124 - DNA, 20 bp, Artificial Sequence
  source: /note="Description of Artificial Sequence: Synthetic oligonucleotide"
cgccaccttcttccctcgcg

SEQ ID NO: 125 - DNA, 20 bp, Artificial Sequence
  source: /note="Description of Artificial Sequence: Synthetic oligonucleotide"
ccgccaccttcttccctcgc

SEQ ID NO: 126 - DNA, 20 bp, Artificial Sequence
  source: /note="Description of Artificial Sequence: Synthetic oligonucleotide"
gccgccaccttcttccctcg

SEQ ID NO: 127 - DNA, 20 bp, Artificial Sequence
  source: /note="Description of Artificial Sequence: Synthetic oligonucleotide"
agccgccaccttcttccctc

SEQ ID NO: 128 - DNA, 20 bp, Artificial Sequence
  source: /note="Description of Artificial Sequence: Synthetic oligonucleotide"
gagccgccaccttcttccct

SEQ ID NO: 129 - DNA, 20 bp, Artificial Sequence
  source: /note="Description of Artificial Sequence: Synthetic oligonucleotide"
ggagccgccaccttcttccc

SEQ ID NO: 130 - DNA, 20 bp, Artificial Sequence
  source: /note="Description of Artificial Sequence: Synthetic oligonucleotide"
gggagccgccaccttcttcc

SEQ ID NO: 131 - DNA, 20 bp, Artificial Sequence
  source: /note="Description of Artificial Sequence: Synthetic oligonucleotide"
tgggagccgccaccttcttc

SEQ ID NO: 132 - DNA, 20 bp, Artificial Sequence
  source: /note="Description of Artificial Sequence: Synthetic oligonucleotide"
gtgggagccgccaccttctt

SEQ ID NO: 133 - DNA, 20 bp, Artificial Sequence
  source: /note="Description of Artificial Sequence: Synthetic oligonucleotide"
agtgggagccgccaccttct

SEQ ID NO: 134 - DNA, 20 bp, Artificial Sequence
  source: /note="Description of Artificial Sequence: Synthetic oligonucleotide"
gagtgggagccgccaccttc

SEQ ID NO: 135 - DNA, 20 bp, Artificial Sequence
  source: /note="Description of Artificial Sequence: Synthetic oligonucleotide"
cgagtgggagccgccacctt

SEQ ID NO: 136 - DNA, 20 bp, Artificial Sequence
  source: /note="Description of Artificial Sequence: Synthetic oligonucleotide"
gcgagtgggagccgccacct

SEQ ID NO: 137 - DNA, 20 bp, Artificial Sequence
  source: /note="Description of Artificial Sequence: Synthetic oligonucleotide"
agcgagtgggagccgccacc

SEQ ID NO: 138 - DNA, 20 bp, Artificial Sequence
  source: /note="Description of Artificial Sequence: Synthetic oligonucleotide"
aagcgagtgggagccgccac

SEQ ID NO: 139 - DNA, 20 bp, Artificial Sequence
  source: /note="Description of Artificial Sequence: Synthetic oligonucleotide"
gaagcgagtgggagccgcca

SEQ ID NO: 140 - DNA, 20 bp, Artificial Sequence
  source: /note="Description of Artificial Sequence: Synthetic oligonucleotide"
agaagcgagtgggagccgcc

SEQ ID NO: 141 - DNA, 20 bp, Artificial Sequence
  source: /note="Description of Artificial Sequence: Synthetic oligonucleotide"
gagaagcgagtgggagccgc

SEQ ID NO: 142 - DNA, 20 bp, Artificial Sequence
  source: /note="Description of Artificial Sequence: Synthetic oligonucleotide"
ggagaagcgagtgggagccg

SEQ ID NO: 143 - DNA, 20 bp, Artificial Sequence
  source: /note="Description of Artificial Sequence: Synthetic oligonucleotide"
gggagaagcgagtgggagcc

SEQ ID NO: 144 - DNA, 20 bp, Artificial Sequence
  source: /note="Description of Artificial Sequence: Synthetic oligonucleotide"
agggagaagcgagtgggagc

SEQ ID NO: 145 - DNA, 20 bp, Artificial Sequence
  source: /note="Description of Artificial Sequence: Synthetic oligonucleotide"
gagggagaagcgagtgggag

SEQ ID NO: 146 - DNA, 20 bp, Artificial Sequence
  source: /note="Description of Artificial Sequence: Synthetic oligonucleotide"
cgagggagaagcgagtggga

SEQ ID NO: 147 - DNA, 20 bp, Artificial Sequence
  source: /note="Description of Artificial Sequence: Synthetic oligonucleotide"
ccgagggagaagcgagtggg

SEQ ID NO: 148 - DNA, 20 bp, Artificial Sequence
  source: /note="Description of Artificial Sequence: Synthetic oligonucleotide"
cccgagggagaagcgagtgg

SEQ ID NO: 149 - DNA, 20 bp, Artificial Sequence
  source: /note="Description of Artificial Sequence: Synthetic oligonucleotide"
acccgagggagaagcgagtg

SEQ ID NO: 150 - DNA, 20 bp, Artificial Sequence
  source: /note="Description of Artificial Sequence: Synthetic oligonucleotide"
gacccgagggagaagcgagt

SEQ ID NO: 151 - DNA, 20 bp, Artificial Sequence
  source: /note="Description of Artificial Sequence: Synthetic oligonucleotide"
cgacccgagggagaagcgag

SEQ ID NO: 152 - DNA, 20 bp, Artificial Sequence
  source: /note="Description of Artificial Sequence: Synthetic oligonucleotide"
ccgacccgagggagaagcga

SEQ ID NO: 153 - DNA, 20 bp, Artificial Sequence
  source: /note="Description of Artificial Sequence: Synthetic oligonucleotide"
cccgacccgagggagaagcg

SEQ ID NO: 154 - DNA, 20 bp, Artificial Sequence
  source: /note="Description of Artificial Sequence: Synthetic oligonucleotide"
acccgacccgagggagaagc

SEQ ID NO: 155 - DNA, 20 bp, Artificial Sequence
  source: /note="Description of Artificial Sequence: Synthetic oligonucleotide"
gacccgacccgagggagaag

SEQ ID NO: 156 - DNA, 20 bp, Artificial Sequence
  source: /note="Description of Artificial Sequence: Synthetic oligonucleotide"
ggacccgacccgagggagaa

SEQ ID NO: 157 - DNA, 20 bp, Artificial Sequence
  source: /note="Description of Artificial Sequence: Synthetic oligonucleotide"
cggacccgacccgagggaga

SEQ ID NO: 158 - DNA, 20 bp, Artificial Sequence
  source: /note="Description of Artificial Sequence: Synthetic oligonucleotide"
tcggacccgacccgagggag

SEQ ID NO: 159 - DNA, 20 bp, Artificial Sequence
  source: /note="Description of Artificial Sequence: Synthetic oligonucleotide"
ctcggacccgacccgaggga

SEQ ID NO: 160 - DNA, 20 bp, Artificial Sequence
  source: /note="Description of Artificial Sequence: Synthetic oligonucleotide"
agctcggacccgacccgagg

SEQ ID NO: 161 - DNA, 20 bp, Artificial Sequence
  source: /note="Description of Artificial Sequence: Synthetic oligonucleotide"
cagctcggacccgacccgag

SEQ ID NO: 162 - DNA, 20 bp, Artificial Sequence
  source: /note="Description of Artificial Sequence: Synthetic oligonucleotide"
gcagctcggacccgacccga

SEQ ID NO: 163 - DNA, 20 bp, Artificial Sequence
  source: /note="Description of Artificial Sequence: Synthetic oligonucleotide"
tggcagctcggacccgaccc

SEQ ID NO: 164 - DNA, 20 bp, Artificial Sequence
  source: /note="Description of Artificial Sequence: Synthetic oligonucleotide"
ctggcagctcggacccgacc

SEQ ID NO: 165 - DNA, 20 bp, Artificial Sequence
  source: /note="Description of Artificial Sequence: Synthetic oligonucleotide"
cctggcagctcggacccgac

SEQ ID NO: 166 - DNA, 20 bp, Artificial Sequence
  source: /note="Description of Artificial Sequence: Synthetic oligonucleotide"
gcctggcagctcggacccga

SEQ ID NO: 167 - DNA, 20 bp, Artificial Sequence
  source: /note="Description of Artificial Sequence: Synthetic oligonucleotide"
tgcggcctggcagctcggac

SEQ ID NO: 168 - DNA, 20 bp, Artificial Sequence
  source: /note="Description of Artificial Sequence: Synthetic oligonucleotide"
atgcggcctggcagctcgga

SEQ ID NO: 169 - DNA, 20 bp, Artificial Sequence
  source: /note="Description of Artificial Sequence: Synthetic oligonucleotide"
catgcggcctggcagctcgg

SEQ ID NO: 170 - DNA, 20 bp, Artificial Sequence
  source: /note="Description of Artificial Sequence: Synthetic oligonucleotide"
gcatgcggcctggcagctcg

SEQ ID NO: 171 - DNA, 20 bp, Artificial Sequence
  source: /note="Description of Artificial Sequence: Synthetic oligonucleotide"
ggcatgcggcctggcagctc

SEQ ID NO: 172 - DNA, 20 bp, Artificial Sequence
  source: /note="Description of Artificial Sequence: Synthetic oligonucleotide"
tggcatgcggcctggcagct

SEQ ID NO: 173 - DNA, 20 bp, Artificial Sequence
  source: /note="Description of Artificial Sequence: Synthetic oligonucleotide"
gtggcatgcggcctggcagc

SEQ ID NO: 174 - DNA, 20 bp, Artificial Sequence
  source: /note="Description of Artificial Sequence: Synthetic oligonucleotide"
agtggcatgcggcctggcag

SEQ ID NO: 175 - DNA, 20 bp, Artificial Sequence
  source: /note="Description of Artificial Sequence: Synthetic oligonucleotide"
gagtggcatgcggcctggca

SEQ ID NO: 176 - DNA, 20 bp, Artificial Sequence
  source: /note="Description of Artificial Sequence: Synthetic oligonucleotide"
ggagtggcatgcggcctggc

SEQ ID NO: 177 - DNA, 20 bp, Artificial Sequence
  source: /note="Description of Artificial Sequence: Synthetic oligonucleotide"
gggagtggcatgcggcctgg

SEQ ID NO: 178 - DNA, 20 bp, Artificial Sequence
  source: /note="Description of Artificial Sequence: Synthetic oligonucleotide"
agggagtggcatgcggcctg

SEQ ID NO: 179 - DNA, 20 bp, Artificial Sequence
  source: /note="Description of Artificial Sequence: Synthetic oligonucleotide"
cagggagtggcatgcggcct

SEQ ID NO: 180 - DNA, 20 bp, Artificial Sequence
  source: /note="Description of Artificial Sequence: Synthetic oligonucleotide"
tcagggagtggcatgcggcc

SEQ ID NO: 181 - DNA, 20 bp, Artificial Sequence
  source: /note="Description of Artificial Sequence: Synthetic oligonucleotide"
gtcagggagtggcatgcggc

SEQ ID NO: 182 - DNA, 20 bp, Artificial Sequence
  source: /note="Description of Artificial Sequence: Synthetic oligonucleotide"
cgtcagggagtggcatgcgg

SEQ ID NO: 183 - DNA, 20 bp, Artificial Sequence
  source: /note="Description of Artificial Sequence: Synthetic oligonucleotide"
ccgtcagggagtggcatgcg

SEQ ID NO: 184 - DNA, 20 bp, Artificial Sequence
  source: /note="Description of Artificial Sequence: Synthetic oligonucleotide"
cccgtcagggagtggcatgc

SEQ ID NO: 185 - DNA, 20 bp, Artificial Sequence
  source: /note="Description of Artificial Sequence: Synthetic oligonucleotide"
ccccgtcagggagtggcatg

SEQ ID NO: 186 - DNA, 20 bp, Artificial Sequence
  source: /note="Description of Artificial Sequence: Synthetic oligonucleotide"
gccccgtcagggagtggcat

SEQ ID NO: 187 - DNA, 20 bp, Artificial Sequence
  source: /note="Description of Artificial Sequence: Synthetic oligonucleotide"
cgccccgtcagggagtggca

SEQ ID NO: 188 - DNA, 20 bp, Artificial Sequence
  source: /note="Description of Artificial Sequence: Synthetic oligonucleotide"
tccgcgccccgtcagggagt

SEQ ID NO: 189 - DNA, 20 bp, Artificial Sequence
  source: /note="Description of Artificial Sequence: Synthetic oligonucleotide"
ttggtgtagcccccgccgcg

SEQ ID NO: 190 - DNA, 20 bp, Artificial Sequence
  source: /note="Description of Artificial Sequence: Synthetic oligonucleotide"
gttggtgtagcccccgccgc

SEQ ID NO: 191 - DNA, 20 bp, Artificial Sequence
  source: /note="Description of Artificial Sequence: Synthetic oligonucleotide"
ggttggtgtagcccccgccg

SEQ ID NO: 192 - DNA, 20 bp, Artificial Sequence
  source: /note="Description of Artificial Sequence: Synthetic oligonucleotide"
cggttggtgtagcccccgcc

SEQ ID NO: 193 - DNA, 20 bp, Artificial Sequence
  source: /note="Description of Artificial Sequence: Synthetic oligonucleotide"
ccggttggtgtagcccccgc

SEQ ID NO: 194 - DNA, 20 bp, Artificial Sequence
  source: /note="Description of Artificial Sequence: Synthetic oligonucleotide"
tccggttggtgtagcccccg

SEQ ID NO: 195 - DNA, 20 bp, Artificial Sequence
  source: /note="Description of Artificial Sequence: Synthetic oligonucleotide"
gtccggttggtgtagccccc

SEQ ID NO: 196 - DNA, 20 bp, Artificial Sequence
  source: /note="Description of Artificial Sequence: Synthetic oligonucleotide"
ggtccggttggtgtagcccc

SEQ ID NO: 197 - DNA, 20 bp, Artificial Sequence
  source: /note="Description of Artificial Sequence: Synthetic oligonucleotide"
aggtccggttggtgtagccc

SEQ ID NO: 198 - DNA, 20 bp, Artificial Sequence
  source: /note="Description of Artificial Sequence: Synthetic oligonucleotide"
aaggtccggttggtgtagcc

SEQ ID NO: 199 - DNA, 20 bp, Artificial Sequence
  source: /note="Description of Artificial Sequence: Synthetic oligonucleotide"
gaaggtccggttggtgtagc

SEQ ID NO: 200 - DNA, 20 bp, Artificial Sequence
  source: /note="Description of Artificial Sequence: Synthetic oligonucleotide"
cgaaggtccggttggtgtag

SEQ ID NO: 201 - DNA, 20 bp, Artificial Sequence
  source: /note="Description of Artificial Sequence: Synthetic oligonucleotide"
tcgaaggtccggttggtgta

SEQ ID NO: 202 - DNA, 20 bp, Artificial Sequence
  source: /note="Description of Artificial Sequence: Synthetic oligonucleotide"
ctcgaaggtccggttggtgt

SEQ ID NO: 203 - DNA, 20 bp, Artificial Sequence
  source: /note="Description of Artificial Sequence: Synthetic oligonucleotide"
actcgaaggtccggttggtg

SEQ ID NO: 204 - DNA, 20 bp, Artificial Sequence
  source: /note="Description of Artificial Sequence: Synthetic oligonucleotide"
aactcgaaggtccggttggt

SEQ ID NO: 205 - DNA, 20 bp, Artificial Sequence
  source: /note="Description of Artificial Sequence: Synthetic oligonucleotide"
aaactcgaaggtccggttgg

SEQ ID NO: 206 - DNA, 20 bp, Artificial Sequence
  source: /note="Description of Artificial Sequence: Synthetic oligonucleotide"
caaactcgaaggtccggttg

SEQ ID NO: 207 - DNA, 20 bp, Artificial Sequence
  source: /note="Description of Artificial Sequence: Synthetic oligonucleotide"
tcaaactcgaaggtccggtt

SEQ ID NO: 208 - DNA, 20 bp, Artificial Sequence
  source: /note="Description of Artificial Sequence: Synthetic oligonucleotide"
gtcaaactcgaaggtccggt

SEQ ID NO: 209 - DNA, 20 bp, Artificial Sequence
  source: /note="Description of Artificial Sequence: Synthetic oligonucleotide"
cgtcaaactcgaaggtccgg

SEQ ID NO: 210 - DNA, 20 bp, Artificial Sequence
  source: /note="Description of Artificial Sequence: Synthetic oligonucleotide"
tcgtcaaactcgaaggtccg

SEQ ID NO: 211 - DNA, 20 bp, Artificial Sequence
  source: /note="Description of Artificial Sequence: Synthetic oligonucleotide"
gtcgtcaaactcgaaggtcc

SEQ ID NO: 212 - DNA, 20 bp, Artificial Sequence
  source: /note="Description of Artificial Sequence: Synthetic oligonucleotide"
cgtcgtcaaactcgaaggtc

SEQ ID NO: 213 - DNA, 20 bp, Artificial Sequence
  source: /note="Description of Artificial Sequence: Synthetic oligonucleotide"
ccgtcgtcaaactcgaaggt

SEQ ID NO: 214 - DNA, 20 bp, Artificial Sequence
  source: /note="Description of Artificial Sequence: Synthetic oligonucleotide"
gccgtcgtcaaactcgaagg

SEQ ID NO: 215 - DNA, 20 bp, Artificial Sequence
  source: /note="Description of Artificial Sequence: Synthetic oligonucleotide"
ggccgtcgtcaaactcgaag

SEQ ID NO: 216 - DNA, 20 bp, Artificial Sequence
  source: /note="Description of Artificial Sequence: Synthetic oligonucleotide"
tggccgtcgtcaaactcgaa

SEQ ID NO: 217 - DNA, 20 bp, Artificial Sequence
  source: /note="Description of Artificial Sequence: Synthetic oligonucleotide"
ttggccgtcgtcaaactcga

SEQ ID NO: 218 - DNA, 20 bp, Artificial Sequence
  source: /note="Description of Artificial Sequence: Synthetic oligonucleotide"
attggccgtcgtcaaactcg

SEQ ID NO: 219 - DNA, 20 bp, Artificial Sequence
  source: /note="Description of Artificial Sequence: Synthetic oligonucleotide"
cattggccgtcgtcaaactc

SEQ ID NO: 220 - DNA, 20 bp, Artificial Sequence
  source: /note="Description of Artificial Sequence: Synthetic oligonucleotide"
gcattggccgtcgtcaaact

SEQ ID NO: 221 - DNA, 20 bp, Artificial Sequence
  source: /note="Description of Artificial Sequence: Synthetic oligonucleotide"
cgcattggccgtcgtcaaac

SEQ ID NO: 222 - DNA, 20 bp, Artificial Sequence
  source: /note="Description of Artificial Sequence: Synthetic oligonucleotide"
gcgcattggccgtcgtcaaa

SEQ ID NO: 223 - DNA, 20 bp, Artificial Sequence
  source: /note="Description of Artificial Sequence: Synthetic oligonucleotide"
ggcgcattggccgtcgtcaa

SEQ ID NO: 224 - DNA, 20 bp, Artificial Sequence
  source: /note="Description of Artificial Sequence: Synthetic oligonucleotide"
gggcgcattggccgtcgtca

SEQ ID NO: 225 - DNA, 20 bp, Artificial Sequence
  source: /note="Description of Artificial Sequence: Synthetic oligonucleotide"
gtcgctcatcttgaagccgg

SEQ ID NO: 226 - DNA, 20 bp, Artificial Sequence
  source: /note="Description of Artificial Sequence: Synthetic oligonucleotide"
ggtcgctcatcttgaagccg

SEQ ID NO: 227 - DNA, 20 bp, Artificial Sequence
  source: /note="Description of Artificial Sequence: Synthetic oligonucleotide"
aggtcgctcatcttgaagcc

SEQ ID NO: 228 - DNA, 20 bp, Artificial Sequence
  source: /note="Description of Artificial Sequence: Synthetic oligonucleotide"
caggtcgctcatcttgaagc

SEQ ID NO: 229 - DNA, 20 bp, Artificial Sequence
  source: /note="Description of Artificial Sequence: Synthetic oligonucleotide"
ccaggtcgctcatcttgaag

SEQ ID NO: 230 - DNA, 20 bp, Artificial Sequence
  source: /note="Description of Artificial Sequence: Synthetic oligonucleotide"
tccaggtcgctcatcttgaa

SEQ ID NO: 231 - DNA, 20 bp, Artificial Sequence
  source: /note="Description of Artificial Sequence: Synthetic oligonucleotide"
gtccaggtcgctcatcttga

SEQ ID NO: 232 - DNA, 20 bp, Artificial Sequence
  source: /note="Description of Artificial Sequence: Synthetic oligonucleotide"
agtccaggtcgctcatcttg

SEQ ID NO: 233 - DNA, 20 bp, Artificial Sequence
  source: /note="Description of Artificial Sequence: Synthetic oligonucleotide"
gagtccaggtcgctcatctt

SEQ ID NO: 234 - DNA, 20 bp, Artificial Sequence
  source: /note="Description of Artificial Sequence: Synthetic oligonucleotide"
ggagtccaggtcgctcatct

SEQ ID NO: 235 - DNA, 20 bp, Artificial Sequence
  source: /note="Description of Artificial Sequence: Synthetic oligonucleotide"
cggagtccaggtcgctcatc

SEQ ID NO: 236 - DNA, 20 bp, Artificial Sequence
  source: /note="Description of Artificial Sequence: Synthetic oligonucleotide"
tcggagtccaggtcgctcat

SEQ ID NO: 237 - DNA, 20 bp, Artificial Sequence
  source: /note="Description of Artificial Sequence: Synthetic oligonucleotide"
ctcggagtccaggtcgctca

SEQ ID NO: 238 - DNA, 20 bp, Artificial Sequence
  source: /note="Description of Artificial Sequence: Synthetic oligonucleotide"
cctcggagtccaggtcgctc

SEQ ID NO: 239 - DNA, 20 bp, Artificial Sequence
  source: /note="Description of Artificial Sequence: Synthetic oligonucleotide"
acctcggagtccaggtcgct

SEQ ID NO: 240 - DNA, 20 bp, Artificial Sequence
  source: /note="Description of Artificial Sequence: Synthetic oligonucleotide"
cacctcggagtccaggtcgc

SEQ ID NO: 241 - DNA, 20 bp, Artificial Sequence
  source: /note="Description of Artificial Sequence: Synthetic oligonucleotide"
gcacctcggagtccaggtcg

SEQ ID NO: 242 - DNA, 20 bp, Artificial Sequence
  source: /note="Description of Artificial Sequence: Synthetic oligonucleotide"
agcacctcggagtccaggtc

SEQ ID NO: 243 - DNA, 20 bp, Artificial Sequence
  source: /note="Description of Artificial Sequence: Synthetic oligonucleotide"
cagcacctcggagtccaggt

SEQ ID NO: 244 - DNA, 20 bp, Artificial Sequence
  source: /note="Description of Artificial Sequence: Synthetic oligonucleotide"
gcagcacctcggagtccagg

SEQ ID NO: 245 - DNA, 20 bp, Artificial Sequence
  source: /note="Description of Artificial Sequence: Synthetic oligonucleotide"
ggcagcacctcggagtccag

SEQ ID NO: 246 - DNA, 20 bp, Artificial Sequence
  source: /note="Description of Artificial Sequence: Synthetic oligonucleotide"
gggcagcacctcggagtcca

SEQ ID NO: 247 - DNA, 20 bp, Artificial Sequence
  source: /note="Description of Artificial Sequence: Synthetic oligonucleotide"
agggcagcacctcggagtcc

SEQ ID NO: 248 - DNA, 20 bp, Artificial Sequence
  source: /note="Description of Artificial Sequence: Synthetic oligonucleotide"
aagggcagcacctcggagtc

SEQ ID NO: 249 - DNA, 20 bp, Artificial Sequence
  source: /note="Description of Artificial Sequence: Synthetic oligonucleotide"
caagggcagcacctcggagt

SEQ ID NO: 250 - DNA, 20 bp, Artificial Sequence
  source: /note="Description of Artificial Sequence: Synthetic oligonucleotide"
gcaagggcagcacctcggag

SEQ ID NO: 251 - DNA, 20 bp, Artificial Sequence
  source: /note="Description of Artificial Sequence: Synthetic oligonucleotide"
ggcaagggcagcacctcgga

SEQ ID NO: 252 - DNA, 20 bp, Artificial Sequence
  source: /note="Description of Artificial Sequence: Synthetic oligonucleotide"
cggcaagggcagcacctcgg

SEQ ID NO: 253 - DNA, 20 bp, Artificial Sequence
  source: /note="Description of Artificial Sequence: Synthetic oligonucleotide"
gcggcaagggcagcacctcg

SEQ ID NO: 254 - DNA, 20 bp, Artificial Sequence
  source: /note="Description of Artificial Sequence: Synthetic oligonucleotide"
ggcggcaagggcagcacctc

SEQ ID NO: 255 - DNA, 20 bp, Artificial Sequence
  source: /note="Description of Artificial Sequence: Synthetic oligonucleotide"
cggcggcaagggcagcacct

SEQ ID NO: 256 - DNA, 20 bp, Artificial Sequence
  source: /note="Description of Artificial Sequence: Synthetic oligonucleotide"
tagcgcggcggcaagggcag

SEQ ID NO: 257 - DNA, 20 bp, Artificial Sequence
  source: /note="Description of Artificial Sequence: Synthetic oligonucleotide"
gtagcgcggcggcaagggca

SEQ ID NO: 258 - DNA, 20 bp, Artificial Sequence
  source: /note="Description of Artificial Sequence: Synthetic oligonucleotide"
agcggtagcgcggcggcaag

SEQ ID NO: 259 - DNA, 20 bp, Artificial Sequence
  source: /note="Description of Artificial Sequence: Synthetic oligonucleotide"
aagcggtagcgcggcggcaa

SEQ ID NO: 260 - DNA, 20 bp, Artificial Sequence
  source: /note="Description of Artificial Sequence: Synthetic oligonucleotide"
gaagcggtagcgcggcggca

SEQ ID NO: 261 - DNA, 20 bp, Artificial Sequence
  source: /note="Description of Artificial Sequence: Synthetic oligonucleotide"
tcccggaagcggtagcgcgg

SEQ ID NO: 262 - DNA, 20 bp, Artificial Sequence
  source: /note="Description of Artificial Sequence: Synthetic oligonucleotide"
gtcccggaagcggtagcgcg

SEQ ID NO: 263 - DNA, 20 bp, Artificial Sequence
  source: /note="Description of Artificial Sequence: Synthetic oligonucleotide"
ggtcccggaagcggtagcgc

SEQ ID NO: 264 - DNA, 20 bp, Artificial Sequence
  source: /note="Description of Artificial Sequence: Synthetic oligonucleotide"
aggtcccggaagcggtagcg

SEQ ID NO: 265 - DNA, 20 bp, Artificial Sequence
  source: /note="Description of Artificial Sequence: Synthetic oligonucleotide"
caggtcccggaagcggtagc

SEQ ID NO: 266 - DNA, 20 bp, Artificial Sequence
  source: /note="Description of Artificial Sequence: Synthetic oligonucleotide"
gcaggtcccggaagcggtag

SEQ ID NO: 267 - DNA, 20 bp, Artificial Sequence
  source: /note="Description of Artificial Sequence: Synthetic oligonucleotide"
agcaggtcccggaagcggta

SEQ ID NO: 268 - DNA, 20 bp, Artificial Sequence
  source: /note="Description of Artificial Sequence: Synthetic oligonucleotide"
cagcaggtcccggaagcggt

SEQ ID NO: 269 - DNA, 20 bp, Artificial Sequence
  source: /note="Description of Artificial Sequence: Synthetic oligonucleotide"
gcagcaggtcccggaagcgg

SEQ ID NO: 270 - DNA, 20 bp, Artificial Sequence
  source: /note="Description of Artificial Sequence: Synthetic oligonucleotide"
agcagcaggtcccggaagcg

SEQ ID NO: 271 - DNA, 20 bp, Artificial Sequence
  source: /note="Description of Artificial Sequence: Synthetic oligonucleotide"
cagcagcaggtcccggaagc

SEQ ID NO: 272 - DNA, 20 bp, Artificial Sequence
  source: /note="Description of Artificial Sequence: Synthetic oligonucleotide"
ccagcagcaggtcccggaag

SEQ ID NO: 273 - DNA, 20 bp, Artificial Sequence
  source: /note="Description of Artificial Sequence: Synthetic oligonucleotide"
cccagcagcaggtcccggaa

SEQ ID NO: 274 - DNA, 20 bp, Artificial Sequence
  source: /note="Description of Artificial Sequence: Synthetic oligonucleotide"
gcccagcagcaggtcccgga

SEQ ID NO: 275 - DNA, 20 bp, Artificial Sequence
  source: /note="Description of Artificial Sequence: Synthetic oligonucleotide"
tcgcccagcagcaggtcccg

SEQ ID NO: 276 - DNA, 20 bp, Artificial Sequence
  source: /note="Description of Artificial Sequence: Synthetic oligonucleotide"
gtcgcccagcagcaggtccc

SEQ ID NO: 277 - DNA, 20 bp, Artificial Sequence
  source: /note="Description of Artificial Sequence: Synthetic oligonucleotide"
ggtcgcccagcagcaggtcc

SEQ ID NO: 278 - DNA, 20 bp, Artificial Sequence
  source: /note="Description of Artificial Sequence: Synthetic oligonucleotide"
gggtcgcccagcagcaggtc

SEQ ID NO: 279 - DNA, 20 bp, Artificial Sequence
  source: /note="Description of Artificial Sequence: Synthetic oligonucleotide"
cgggtcgcccagcagcaggt

SEQ ID NO: 280 - DNA, 20 bp, Artificial Sequence
  source: /note="Description of Artificial Sequence: Synthetic oligonucleotide"
acgggtcgcccagcagcagg

SEQ ID NO: 281 - DNA, 20 bp, Artificial Sequence
  source: /note="Description of Artificial Sequence: Synthetic oligonucleotide"
gacgggtcgcccagcagcag

SEQ ID NO: 282 - DNA, 20 bp, Artificial Sequence
  source: /note="Description of Artificial Sequence: Synthetic oligonucleotide"
ggacgggtcgcccagcagca

SEQ ID NO: 283 - DNA, 20 bp, Artificial Sequence
  source: /note="Description of Artificial Sequence: Synthetic oligonucleotide"
aggacgggtcgcccagcagc

SEQ ID NO: 284 - DNA, 20 bp, Artificial Sequence
  source: /note="Description of Artificial Sequence: Synthetic oligonucleotide"
aaggacgggtcgcccagcag

SEQ ID NO: 285 - DNA, 20 bp, Artificial Sequence
  source: /note="Description of Artificial Sequence: Synthetic oligonucleotide"
gaaggacgggtcgcccagca

SEQ ID NO: 286 - DNA, 20 bp, Artificial Sequence
  source: /note="Description of Artificial Sequence: Synthetic oligonucleotide"
ggaaggacgggtcgcccagc

SEQ ID NO: 287 - DNA, 20 bp, Artificial Sequence
  source: /note="Description of Artificial Sequence: Synthetic oligonucleotide"
tggaaggacgggtcgcccag

SEQ ID NO: 288 - DNA, 20 bp, Artificial Sequence
  source: /note="Description of Artificial Sequence: Synthetic oligonucleotide"
ctggaaggacgggtcgccca

SEQ ID NO: 289 - DNA, 20 bp, Artificial Sequence
  source: /note="Description of Artificial Sequence: Synthetic oligonucleotide"
tctggaaggacgggtcgccc

SEQ ID NO: 290 - DNA, 20 bp, Artificial Sequence
  source: /note="Description of Artificial Sequence: Synthetic oligonucleotide"
ttctggaaggacgggtcgcc

SEQ ID NO: 291 - DNA, 20 bp, Artificial Sequence
  source: /note="Description of Artificial Sequence: Synthetic oligonucleotide"
gttctggaaggacgggtcgc

SEQ ID NO: 292 - DNA, 20 bp, Artificial Sequence
  source: /note="Description of Artificial Sequence: Synthetic oligonucleotide"
cgttctggaaggacgggtcg

SEQ ID NO: 293 - DNA, 20 bp, Artificial Sequence
  source: /note="Description of Artificial Sequence: Synthetic oligonucleotide"
tcgttctggaaggacgggtc

SEQ ID NO: 294 - DNA, 20 bp, Artificial Sequence
  source: /note="Description of Artificial Sequence: Synthetic oligonucleotide"
gtcgttctggaaggacgggt

SEQ ID NO: 295 - DNA, 20 bp, Artificial Sequence
  source: /note="Description of Artificial Sequence: Synthetic oligonucleotide"
cgtcgttctggaaggacggg

SEQ ID NO: 296 - DNA, 20 bp, Artificial Sequence
  source: /note="Description of Artificial Sequence: Synthetic oligonucleotide"
tcgtcgttctggaaggacgg

SEQ ID NO: 297 - DNA, 20 bp, Artificial Sequence
  source: /note="Description of Artificial Sequence: Synthetic oligonucleotide"
gtcgtcgttctggaaggacg

SEQ ID NO: 298 - DNA, 20 bp, Artificial Sequence
  source: /note="Description of Artificial Sequence: Synthetic oligonucleotide"
tgtcgtcgttctggaaggac

SEQ ID NO: 299 - DNA, 20 bp, Artificial Sequence
  source: /note="Description of Artificial Sequence: Synthetic oligonucleotide"
ctgtcgtcgttctggaagga

SEQ ID NO: 300 - DNA, 20 bp, Artificial Sequence
  source: /note="Description of Artificial Sequence: Synthetic oligonucleotide"
cctgtcgtcgttctggaagg

SEQ ID NO: 301 - DNA, 20 bp, Artificial Sequence
  source: /note="Description of Artificial Sequence: Synthetic oligonucleotide"
ccctgtcgtcgttctggaag

SEQ ID NO: 302 - DNA, 20 bp, Artificial Sequence
  source: /note="Description of Artificial Sequence: Synthetic oligonucleotide"
gaccctgtcgtcgttctgga

SEQ ID NO: 303 - DNA, 20 bp, Artificial Sequence
  source: /note="Description of Artificial Sequence: Synthetic oligonucleotide"
ggaccctgtcgtcgttctgg

SEQ ID NO: 304 - DNA, 20 bp, Artificial Sequence
  source: /note="Description of Artificial Sequence: Synthetic oligonucleotide"
tggaccctgtcgtcgttctg

SEQ ID NO: 305 - DNA, 20 bp, Artificial Sequence
  source: /note="Description of Artificial Sequence: Synthetic oligonucleotide"
ctggaccctgtcgtcgttct

SEQ ID NO: 306 - DNA, 20 bp, Artificial Sequence
  source: /note="Description of Artificial Sequence: Synthetic oligonucleotide"
cctggaccctgtcgtcgttc

SEQ ID NO: 307 - DNA, 20 bp, Artificial Sequence
  source: /note="Description of Artificial Sequence: Synthetic oligonucleotide"
acctggaccctgtcgtcgtt

SEQ ID NO: 308 - DNA, 20 bp, Artificial Sequence
  source: /note="Description of Artificial Sequence: Synthetic oligonucleotide"
cacctggaccctgtcgtcgt

SEQ ID NO: 309 - DNA, 20 bp, Artificial Sequence
  source: /note="Description of Artificial Sequence: Synthetic oligonucleotide"
ccacctggaccctgtcgtcg

SEQ ID NO: 310 - DNA, 20 bp, Artificial Sequence
  source: /note="Description of Artificial Sequence: Synthetic oligonucleotide"
tccacctggaccctgtcgtc

SEQ ID NO: 311 - DNA, 20 bp, Artificial Sequence
  source: /note="Description of Artificial Sequence: Synthetic oligonucleotide"
ctccacctggaccctgtcgt

SEQ ID NO: 312 - DNA, 20 bp, Artificial Sequence
  source: /note="Description of Artificial Sequence: Synthetic oligonucleotide"
actccacctggaccctgtcg

SEQ ID NO: 313 - DNA, 20 bp, Artificial Sequence
  source: /note="Description of Artificial Sequence: Synthetic oligonucleotide"
aactccacctggaccctgtc

SEQ ID NO: 314 - DNA, 20 bp, Artificial Sequence
  source: /note="Description of Artificial Sequence: Synthetic oligonucleotide"
gaactccacctggaccctgt

SEQ ID NO: 315 - DNA, 20 bp, Artificial Sequence
  source: /note="Description of Artificial Sequence: Synthetic oligonucleotide"
agaactccacctggaccctg

SEQ ID NO: 316 - DNA, 20 bp, Artificial Sequence
  source: /note="Description of Artificial Sequence: Synthetic oligonucleotide"
tagaactccacctggaccct

SEQ ID NO: 317 - DNA, 20 bp, Artificial Sequence
  source: /note="Description of Artificial Sequence: Synthetic oligonucleotide"
gtagaactccacctggaccc

SEQ ID NO: 318 - DNA, 20 bp, Artificial Sequence
  source: /note="Description of Artificial Sequence: Synthetic oligonucleotide"
cgtagaactccacctggacc

SEQ ID NO: 319 - DNA, 20 bp, Artificial Sequence
  source: /note="Description of Artificial Sequence: Synthetic oligonucleotide"
acgtagaactccacctggac

SEQ ID NO: 320 - DNA, 20 bp, Artificial Sequence
  source: /note="Description of Artificial Sequence: Synthetic oligonucleotide"
gacgtagaactccacctgga

SEQ ID NO: 321 - DNA, 20 bp, Artificial Sequence
  source: /note="Description of Artificial Sequence: Synthetic oligonucleotide"
ttgacgtagaactccacctg

SEQ ID NO: 322 - DNA, 20 bp, Artificial Sequence
  source: /note="Description of Artificial Sequence: Synthetic oligonucleotide"
gttgacgtagaactccacct

SEQ ID NO: 323 - DNA, 20 bp, Artificial Sequence
  source: /note="Description of Artificial Sequence: Synthetic oligonucleotide"
cgttgacgtagaactccacc

SEQ ID NO: 324 - DNA, 20 bp, Artificial Sequence
  source: /note="Description of Artificial Sequence: Synthetic oligonucleotide"
tcgttgacgtagaactccac

SEQ ID NO: 325 - DNA, 20 bp, Artificial Sequence
  source: /note="Description of Artificial Sequence: Synthetic oligonucleotide"
ctcgttgacgtagaactcca

SEQ ID NO: 326 - DNA, 20 bp, Artificial Sequence
  source: /note="Description of Artificial Sequence: Synthetic oligonucleotide"
tctcgttgacgtagaactcc

SEQ ID NO: 327 - DNA, 20 bp, Artificial Sequence
  source: /note="Description of Artificial Sequence: Synthetic oligonucleotide"
ttctcgttgacgtagaactc

SEQ ID NO: 328 - DNA, 20 bp, Artificial Sequence
  source: /note="Description of Artificial Sequence: Synthetic oligonucleotide"
gttctcgttgacgtagaact

SEQ ID NO: 329 - DNA, 20 bp, Artificial Sequence
  source: /note="Description of Artificial Sequence: Synthetic oligonucleotide"
tgttctcgttgacgtagaac

SEQ ID NO: 330 - DNA, 20 bp, Artificial Sequence
  source: /note="Description of Artificial Sequence: Synthetic oligonucleotide"
gtgttctcgttgacgtagaa

SEQ ID NO: 331 - DNA, 20 bp, Artificial Sequence
  source: /note="Description of Artificial Sequence: Synthetic oligonucleotide"
ggtgttctcgttgacgtaga

SEQ ID NO: 332 - DNA, 20 bp, Artificial Sequence
  source: /note="Description of Artificial Sequence: Synthetic oligonucleotide"
aggtgttctcgttgacgtag

SEQ ID NO: 333 - DNA, 20 bp, Artificial Sequence
  source: /note="Description of Artificial Sequence: Synthetic oligonucleotide"
aaggtgttctcgttgacgta

SEQ ID NO: 334 - DNA, 20 bp, Artificial Sequence
  source: /note="Description of Artificial Sequence: Synthetic oligonucleotide"
gaaggtgttctcgttgacgt

SEQ ID NO: 335 - DNA, 20 bp, Artificial Sequence
  source: /note="Description of Artificial Sequence: Synthetic oligonucleotide"
tgaaggtgttctcgttgacg

SEQ ID NO: 336 - DNA, 20 bp, Artificial Sequence
  source: /note="Description of Artificial Sequence: Synthetic oligonucleotide"
ttgaaggtgttctcgttgac

SEQ ID NO: 337 - DNA, 20 bp, Artificial Sequence
  source: /note="Description of Artificial Sequence: Synthetic oligonucleotide"
cttgaaggtgttctcgttga

SEQ ID NO: 338 - DNA, 20 bp, Artificial Sequence
  source: /note="Description of Artificial Sequence: Synthetic oligonucleotide"
ccttgaaggtgttctcgttg

SEQ ID NO: 339 - DNA, 20 bp, Artificial Sequence
  source: /note="Description of Artificial Sequence: Synthetic oligonucleotide"
tccttgaaggtgttctcgtt

SEQ ID NO: 340 - DNA, 20 bp, Artificial Sequence
  source: /note="Description of Artificial Sequence: Synthetic oligonucleotide"
ctccttgaaggtgttctcgt

SEQ ID NO: 341 - DNA, 20 bp, Artificial Sequence
  source: /note="Description of Artificial Sequence: Synthetic oligonucleotide"
gctccttgaaggtgttctcg

SEQ ID NO: 342 - DNA, 20 bp, Artificial Sequence
  source: /note="Description of Artificial Sequence: Synthetic oligonucleotide"
cgctccttgaaggtgttctc

SEQ ID NO: 343 - DNA, 20 bp, Artificial Sequence
  source: /note="Description of Artificial Sequence: Synthetic oligonucleotide"
ccgctccttgaaggtgttct

SEQ ID NO: 344 - DNA, 20 bp, Artificial Sequence
  source: /note="Description of Artificial Sequence: Synthetic oligonucleotide"
gccgctccttgaaggtgttc

SEQ ID NO: 345 - DNA, 20 bp, Artificial Sequence
  source: /note="Description of Artificial Sequence: Synthetic oligonucleotide"
agccgctccttgaaggtgtt

SEQ ID NO: 346 - DNA, 20 bp, Artificial Sequence
  source: /note="Description of Artificial Sequence: Synthetic oligonucleotide"
gagccgctccttgaaggtgt

SEQ ID NO: 347 - DNA, 20 bp, Artificial Sequence
  source: /note="Description of Artificial Sequence: Synthetic oligonucleotide"
tgagccgctccttgaaggtg

SEQ ID NO: 348 - DNA, 20 bp, Artificial Sequence
  source: /note="Description of Artificial Sequence: Synthetic oligonucleotide"
ttgagccgctccttgaaggt

SEQ ID NO: 349 - DNA, 20 bp, Artificial Sequence
  source: /note="Description of Artificial Sequence: Synthetic oligonucleotide"
cttgagccgctccttgaagg

SEQ ID NO: 350 - DNA, 20 bp, Artificial Sequence
  source: /note="Description of Artificial Sequence: Synthetic oligonucleotide"
gcttgagccgctccttgaag

SEQ ID NO: 351 - DNA, 20 bp, Artificial Sequence
  source: /note="Description of Artificial Sequence: Synthetic oligonucleotide"
agcttgagccgctccttgaa

SEQ ID NO: 352 - DNA, 20 bp, Artificial Sequence
  source: /note="Description of Artificial Sequence: Synthetic oligonucleotide"
cagcttgagccgctccttga

SEQ ID NO: 353 - DNA, 20 bp, Artificial Sequence
  source: /note="Description of Artificial Sequence: Synthetic oligonucleotide"
acagcttgagccgctccttg

SEQ ID NO: 354 - DNA, 20 bp, Artificial Sequence
  source: /note="Description of Artificial Sequence: Synthetic oligonucleotide"
aacagcttgagccgctcctt

SEQ ID NO: 355 - DNA, 20 bp, Artificial Sequence
  source: /note="Description of Artificial Sequence: Synthetic oligonucleotide"
gaacagcttgagccgctcct

SEQ ID NO: 356 - DNA, 20 bp, Artificial Sequence
  source: /note="Description of Artificial Sequence: Synthetic oligonucleotide"
agaacagcttgagccgctcc

SEQ ID NO: 357 - DNA, 20 bp, Artificial Sequence
  source: /note="Description of Artificial Sequence: Synthetic oligonucleotide"
aagaacagcttgagccgctc

SEQ ID NO: 358 - DNA, 20 bp, Artificial Sequence
  source: /note="Description of Artificial Sequence: Synthetic oligonucleotide"
gaagaacagcttgagccgct

SEQ ID NO: 359 - DNA, 20 bp, Artificial Sequence
  source: /note="Description of Artificial Sequence: Synthetic oligonucleotide"
tgaagaacagcttgagccgc

SEQ ID NO: 360 - DNA, 20 bp, Artificial Sequence
  source: /note="Description of Artificial Sequence: Synthetic oligonucleotide"
atgaagaacagcttgagccg

SEQ ID NO: 361 - DNA, 20 bp, Artificial Sequence
  source: /note="Description of Artificial Sequence: Synthetic oligonucleotide"
gatgaagaacagcttgagcc

SEQ ID NO: 362 - DNA, 20 bp, Artificial Sequence
  source: /note="Description of Artificial Sequence: Synthetic oligonucleotide"
ttgatgaagaacagcttgag

SEQ ID NO: 363 - DNA, 20 bp, Artificial Sequence
  source: /note="Description of Artificial Sequence: Synthetic oligonucleotide"
tttgatgaagaacagcttga

SEQ ID NO: 364 - DNA, 20 bp, Artificial Sequence
  source: /note="Description of Artificial Sequence: Synthetic oligonucleotide"
ttttgatgaagaacagcttg

SEQ ID NO: 365 - DNA, 20 bp, Artificial Sequence
  source: /note="Description of Artificial Sequence: Synthetic oligonucleotide"
gtttttgatgaagaacagct

SEQ ID NO: 366 - DNA, 20 bp, Artificial Sequence
  source: /note="Description of Artificial Sequence: Synthetic oligonucleotide"
ggtttttgatgaagaacagc

SEQ ID NO: 367 - DNA, 20 bp, Artificial Sequence
  source: /note="Description of Artificial Sequence: Synthetic oligonucleotide"
tggtttttgatgaagaacag

SEQ ID NO: 368 - DNA, 20 bp, Artificial Sequence
  source: /note="Description of Artificial Sequence: Synthetic oligonucleotide"
cgatctttggtttttgatga

SEQ ID NO: 369 - DNA, 20 bp, Artificial Sequence
  source: /note="Description of Artificial Sequence: Synthetic oligonucleotide"
tcgatctttggtttttgatg

SEQ ID NO: 370 - DNA, 20 bp, Artificial Sequence
  source: /note="Description of Artificial Sequence: Synthetic oligonucleotide"
ctcgatctttggtttttgat

SEQ ID NO: 371 - DNA, 20 bp, Artificial Sequence
  source: /note="Description of Artificial Sequence: Synthetic oligonucleotide"
ggctcgatctttggtttttg

SEQ ID NO: 372 - DNA, 20 bp, Artificial Sequence
  source: /note="Description of Artificial Sequence: Synthetic oligonucleotide"
aggctcgatctttggttttt

SEQ ID NO: 373 - DNA, 20 bp, Artificial Sequence
  source: /note="Description of Artificial Sequence: Synthetic oligonucleotide"
caggctcgatctttggtttt

SEQ ID NO: 374 - DNA, 20 bp, Artificial Sequence
  source: /note="Description of Artificial Sequence: Synthetic oligonucleotide"
tcaggctcgatctttggttt

SEQ ID NO: 375 - DNA, 20 bp, Artificial Sequence
  source: /note="Description of Artificial Sequence: Synthetic oligonucleotide"
ctcaggctcgatctttggtt

SEQ ID NO: 376 - DNA, 20 bp, Artificial Sequence
  source: /note="Description of Artificial Sequence: Synthetic oligonucleotide"
cctcaggctcgatctttggt

SEQ ID NO: 377 - DNA, 20 bp, Artificial Sequence
  source: /note="Description of Artificial Sequence: Synthetic oligonucleotide"
tcctcaggctcgatctttgg

SEQ ID NO: 378 - DNA, 20 bp, Artificial Sequence
  source: /note="Description of Artificial Sequence: Synthetic oligonucleotide"
atcctcaggctcgatctttg

SEQ ID NO: 379 - DNA, 20 bp, Artificial Sequence
  source: /note="Description of Artificial Sequence: Synthetic oligonucleotide"
gatcctcaggctcgatcttt

SEQ ID NO: 380 - DNA, 20 bp, Artificial Sequence
  source: /note="Description of Artificial Sequence: Synthetic oligonucleotide"
ggatcctcaggctcgatctt

SEQ ID NO: 381 - DNA, 20 bp, Artificial Sequence
  source: /note="Description of Artificial Sequence: Synthetic oligonucleotide"
cggatcctcaggctcgatct

SEQ ID NO: 382 - DNA, 20 bp, Artificial Sequence
  source: /note="Description of Artificial Sequence: Synthetic oligonucleotide"
ccggatcctcaggctcgatc

SEQ ID NO: 383 - DNA, 20 bp, Artificial Sequence
  source: /note="Description of Artificial Sequence: Synthetic oligonucleotide"
gccggatcctcaggctcgat

SEQ ID NO: 384 - DNA, 20 bp, Artificial Sequence
  source: /note="Description of Artificial Sequence: Synthetic oligonucleotide"
agccggatcctcaggctcga

SEQ ID NO: 385 - DNA, 20 bp, Artificial Sequence
  source: /note="Description of Artificial Sequence: Synthetic oligonucleotide"
cagccggatcctcaggctcg

SEQ ID NO: 386 - DNA, 20 bp, Artificial Sequence
  source: /note="Description of Artificial Sequence: Synthetic oligonucleotide"
acagccggatcctcaggctc

SEQ ID NO: 387 - DNA, 20 bp, Artificial Sequence
  source: /note="Description of Artificial Sequence: Synthetic oligonucleotide"
aacagccggatcctcaggct

SEQ ID NO: 388 - DNA, 20 bp, Artificial Sequence
  source: /note="Description of Artificial Sequence: Synthetic oligonucleotide"
gaacagccggatcctcaggc

SEQ ID NO: 389 - DNA, 20 bp, Artificial Sequence
  source: /note="Description of Artificial Sequence: Synthetic oligonucleotide"
tgaacagccggatcctcagg

SEQ ID NO: 390 - DNA, 20 bp, Artificial Sequence
  source: /note="Description of Artificial Sequence: Synthetic oligonucleotide"
ttgaacagccggatcctcag

SEQ ID NO: 391 - DNA, 20 bp, Artificial Sequence
  source: /note="Description of Artificial Sequence: Synthetic oligonucleotide"
gttgaacagccggatcctca

SEQ ID NO: 392 - DNA, 20 bp, Artificial Sequence
  source: /note="Description of Artificial Sequence: Synthetic oligonucleotide"
agttgaacagccggatcctc

SEQ ID NO: 393 - DNA, 20 bp, Artificial Sequence
  source: /note="Description of Artificial Sequence: Synthetic oligonucleotide"
aagttgaacagccggatcct

SEQ ID NO: 394 - DNA, 20 bp, Artificial Sequence
  source: /note="Description of Artificial Sequence: Synthetic oligonucleotide"
gaagttgaacagccggatcc

SEQ ID NO: 395 - DNA, 20 bp, Artificial Sequence
  source: /note="Description of Artificial Sequence: Synthetic oligonucleotide"
agaagttgaacagccggatc

SEQ ID NO: 396 - DNA, 20 bp, Artificial Sequence
  source: /note="Description of Artificial Sequence: Synthetic oligonucleotide"
gagaagttgaacagccggat

SEQ ID NO: 397 - DNA, 20 bp, Artificial Sequence
  source: /note="Description of Artificial Sequence: Synthetic oligonucleotide"
ggagaagttgaacagccgga

SEQ ID NO: 398 - DNA, 20 bp, Artificial Sequence
  source: /note="Description of Artificial Sequence: Synthetic oligonucleotide"
gggagaagttgaacagccgg

SEQ ID NO: 399 - DNA, 20 bp, Artificial Sequence
  source: /note="Description of Artificial Sequence: Synthetic oligonucleotide"
cagggagaagttgaacagcc

SEQ ID NO: 400 - DNA, 20 bp, Artificial Sequence
  source: /note="Description of Artificial Sequence: Synthetic oligonucleotide"
tcagggagaagttgaacagc

SEQ ID NO: 401 - DNA, 20 bp, Artificial Sequence
  source: /note="Description of Artificial Sequence: Synthetic oligonucleotide"
ttcagggagaagttgaacag

SEQ ID NO: 402 - DNA, 20 bp, Artificial Sequence
  source: /note="Description of Artificial Sequence: Synthetic oligonucleotide"
cttcagggagaagttgaaca

SEQ ID NO: 403 - DNA, 20 bp, Artificial Sequence
  source: /note="Description of Artificial Sequence: Synthetic oligonucleotide"
gcttcagggagaagttgaac

SEQ ID NO: 404 - DNA, 20 bp, Artificial Sequence
  source: /note="Description of Artificial Sequence: Synthetic oligonucleotide"
agcttcagggagaagttgaa

SEQ ID NO: 405 - DNA, 20 bp, Artificial Sequence
  source: /note="Description of Artificial Sequence: Synthetic oligonucleotide"
cagcttcagggagaagttga

SEQ ID NO: 406 - DNA, 20 bp, Artificial Sequence
  source: /note="Description of Artificial Sequence: Synthetic oligonucleotide"
gcagcttcagggagaagttg

SEQ ID NO: 407 - DNA, 20 bp, Artificial Sequence
  source: /note="Description of Artificial Sequence: Synthetic oligonucleotide"
agcagcttcagggagaagtt

SEQ ID NO: 408 - DNA, 20 bp, Artificial Sequence
  source: /note="Description of Artificial Sequence: Synthetic oligonucleotide"
gagcagcttcagggagaagt

SEQ ID NO: 409 - DNA, 20 bp, Artificial Sequence
  source: /note="Description of Artificial Sequence: Synthetic oligonucleotide"
tgagcagcttcagggagaag

SEQ ID NO: 410 - DNA, 20 bp, Artificial Sequence
  source: /note="Description of Artificial Sequence: Synthetic oligonucleotide"
gtgagcagcttcagggagaa

SEQ ID NO: 411 - DNA, 20 bp, Artificial Sequence
  source: /note="Description of Artificial Sequence: Synthetic oligonucleotide"
ggtgagcagcttcagggaga

SEQ ID NO: 412 - DNA, 20 bp, Artificial Sequence
  source: /note="Description of Artificial Sequence: Synthetic oligonucleotide"
aggtgagcagcttcagggag

SEQ ID NO: 413 - DNA, 20 bp, Artificial Sequence
  source: /note="Description of Artificial Sequence: Synthetic oligonucleotide"
caggtgagcagcttcaggga

SEQ ID NO: 414 - DNA, 20 bp, Artificial Sequence
  source: /note="Description of Artificial Sequence: Synthetic oligonucleotide"
gcaggtgagcagcttcaggg

SEQ ID NO: 415 - DNA, 20 bp, Artificial Sequence
  source: /note="Description of Artificial Sequence: Synthetic oligonucleotide"
ggcaggtgagcagcttcagg

SEQ ID NO: 416 - DNA, 20 bp, Artificial Sequence
  source: /note="Description of Artificial Sequence: Synthetic oligonucleotide"
aggcaggtgagcagcttcag

SEQ ID NO: 417 - DNA, 20 bp, Artificial Sequence
  source: /note="Description of Artificial Sequence: Synthetic oligonucleotide"
caggcaggtgagcagcttca

SEQ ID NO: 418 - DNA, 20 bp, Artificial Sequence
  source: /note="Description of Artificial Sequence: Synthetic oligonucleotide"
gcaggcaggtgagcagcttc

SEQ ID NO: 419 - DNA, 20 bp, Artificial Sequence
  source: /note="Description of Artificial Sequence: Synthetic oligonucleotide"
agcaggcaggtgagcagctt

SEQ ID NO: 420 - DNA, 20 bp, Artificial Sequence
  source: /note="Description of Artificial Sequence: Synthetic oligonucleotide"
gagcaggcaggtgagcagct

SEQ ID NO: 421 - DNA, 20 bp, Artificial Sequence
  source: /note="Description of Artificial Sequence: Synthetic oligonucleotide"
agagcaggcaggtgagcagc

SEQ ID NO: 422 - DNA, 20 bp, Artificial Sequence
  source: /note="Description of Artificial Sequence: Synthetic oligonucleotide"
tagagcaggcaggtgagcag

SEQ ID NO: 423 - DNA, 20 bp, Artificial Sequence
  source: /note="Description of Artificial Sequence: Synthetic oligonucleotide"
gtagagcaggcaggtgagca

SEQ ID NO: 424 - DNA, 20 bp, Artificial Sequence
  source: /note="Description of Artificial Sequence: Synthetic oligonucleotide"
tgtagagcaggcaggtgagc

SEQ ID NO: 425 - DNA, 20 bp, Artificial Sequence
  source: /note="Description of Artificial Sequence: Synthetic oligonucleotide"
atgtagagcaggcaggtgag

SEQ ID NO: 426 - DNA, 20 bp, Artificial Sequence
  source: /note="Description of Artificial Sequence: Synthetic oligonucleotide"
aatgtagagcaggcaggtga

SEQ ID NO: 427 - DNA, 20 bp, Artificial Sequence
  source: /note="Description of Artificial Sequence: Synthetic oligonucleotide"
caatgtagagcaggcaggtg

SEQ ID NO: 428 - DNA, 20 bp, Artificial Sequence
  source: /note="Description of Artificial Sequence: Synthetic oligonucleotide"
acaatgtagagcaggcaggt

SEQ ID NO: 429 - DNA, 20 bp, Artificial Sequence
  source: /note="Description of Artificial Sequence: Synthetic oligonucleotide"
cacaatgtagagcaggcagg

SEQ ID NO: 430 - DNA, 20 bp, Artificial Sequence
  source: /note="Description of Artificial Sequence: Synthetic oligonucleotide"
gcacaatgtagagcaggcag

SEQ ID NO: 431 - DNA, 20 bp, Artificial Sequence
  source: /note="Description of Artificial Sequence: Synthetic oligonucleotide"
cgcacaatgtagagcaggca

SEQ ID NO: 432 - DNA, 20 bp, Artificial Sequence
  source: /note="Description of Artificial Sequence: Synthetic oligonucleotide"
gcgcacaatgtagagcaggc

SEQ ID NO: 433 - DNA, 20 bp, Artificial Sequence
  source: /note="Description of Artificial Sequence: Synthetic oligonucleotide"
cgcgcacaatgtagagcagg

SEQ ID NO: 434 - DNA, 20 bp, Artificial Sequence
  source: /note="Description of Artificial Sequence: Synthetic oligonucleotide"
acgcgcacaatgtagagcag

SEQ ID NO: 435 - DNA, 20 bp, Artificial Sequence
  source: /note="Description of Artificial Sequence: Synthetic oligonucleotide"
gacgcgcacaatgtagagca

SEQ ID NO: 436 - DNA, 20 bp, Artificial Sequence
  source: /note="Description of Artificial Sequence: Synthetic oligonucleotide"
ggacgcgcacaatgtagagc

SEQ ID NO: 437 - DNA, 20 bp, Artificial Sequence
  source: /note="Description of Artificial Sequence: Synthetic oligonucleotide"
aggacgcgcacaatgtagag

SEQ ID NO: 438 - DNA, 20 bp, Artificial Sequence
  source: /note="Description of Artificial Sequence: Synthetic oligonucleotide"
caggacgcgcacaatgtaga

SEQ ID NO: 439 - DNA, 20 bp, Artificial Sequence
  source: /note="Description of Artificial Sequence: Synthetic oligonucleotide"
gcaggacgcgcacaatgtag

SEQ ID NO: 440 - DNA, 20 bp, Artificial Sequence
  source: /note="Description of Artificial Sequence: Synthetic oligonucleotide"
agcaggacgcgcacaatgta

SEQ ID NO: 441 - DNA, 20 bp, Artificial Sequence
  source: /note="Description of Artificial Sequence: Synthetic oligonucleotide"
gagcaggacgcgcacaatgt

SEQ ID NO: 442 - DNA, 20 bp, Artificial Sequence
  source: /note="Description of Artificial Sequence: Synthetic oligonucleotide"
cgagcaggacgcgcacaatg

SEQ ID NO: 443 - DNA, 20 bp, Artificial Sequence
  source: /note="Description of Artificial Sequence: Synthetic oligonucleotide"
tcgagcaggacgcgcacaat

SEQ ID NO: 444 - DNA, 20 bp, Artificial Sequence
  source: /note="Description of Artificial Sequence: Synthetic oligonucleotide"
atcgagcaggacgcgcacaa

SEQ ID NO: 445 - DNA, 20 bp, Artificial Sequence
  source: /note="Description of Artificial Sequence: Synthetic oligonucleotide"
catcgagcaggacgcgcaca

SEQ ID NO: 446 - DNA, 20 bp, Artificial Sequence
  source: /note="Description of Artificial Sequence: Synthetic oligonucleotide"
tcatcgagcaggacgcgcac

SEQ ID NO: 447 - DNA, 20 bp, Artificial Sequence
  source: /note="Description of Artificial Sequence: Synthetic oligonucleotide"
gtcatcgagcaggacgcgca

SEQ ID NO: 448 - DNA, 20 bp, Artificial Sequence
  source: /note="Description of Artificial Sequence: Synthetic oligonucleotide"
ggtcatcgagcaggacgcgc

SEQ ID NO: 449 - DNA, 20 bp, Artificial Sequence
  source: /note="Description of Artificial Sequence: Synthetic oligonucleotide"
gggtcatcgagcaggacgcg

SEQ ID NO: 450 - DNA, 20 bp, Artificial Sequence
  source: /note="Description of Artificial Sequence: Synthetic oligonucleotide"
cgggtcatcgagcaggacgc

SEQ ID NO: 451 - DNA, 20 bp, Artificial Sequence
  source: /note="Description of Artificial Sequence: Synthetic oligonucleotide"
ccgggtcatcgagcaggacg

SEQ ID NO: 452 - DNA, 20 bp, Artificial Sequence
  source: /note="Description of Artificial Sequence: Synthetic oligonucleotide"
gccgggtcatcgagcaggac

SEQ ID NO: 453 - DNA, 20 bp, Artificial Sequence
  source: /note="Description of Artificial Sequence: Synthetic oligonucleotide"
ggccgggtcatcgagcagga

SEQ ID NO: 454 - DNA, 20 bp, Artificial Sequence
  source: /note="Description of Artificial Sequence: Synthetic oligonucleotide"
gggccgggtcatcgagcagg

SEQ ID NO: 455 - DNA, 20 bp, Artificial Sequence
  source: /note="Description of Artificial Sequence: Synthetic oligonucleotide"
agggccgggtcatcgagcag

SEQ ID NO: 456 - DNA, 20 bp, Artificial Sequence
  source: /note="Description of Artificial Sequence: Synthetic oligonucleotide"
cagggccgggtcatcgagca

SEQ ID NO: 457 - DNA, 20 bp, Artificial Sequence
  source: /note="Description of Artificial Sequence: Synthetic oligonucleotide"
ccagggccgggtcatcgagc

SEQ ID NO: 458 - DNA, 20 bp, Artificial Sequence
  source: /note="Description of Artificial Sequence: Synthetic oligonucleotide"
cccagggccgggtcatcgag

SEQ ID NO: 459 - DNA, 20 bp, Artificial Sequence
  source: /note="Description of Artificial Sequence: Synthetic oligonucleotide"
gcccagggccgggtcatcga

SEQ ID NO: 460 - DNA, 20 bp, Artificial Sequence
  source: /note="Description of Artificial Sequence: Synthetic oligonucleotide"
tgcccagggccgggtcatcg

SEQ ID NO: 461 - DNA, 20 bp, Artificial Sequence
  source: /note="Description of Artificial Sequence: Synthetic oligonucleotide"
atgcccagggccgggtcatc

SEQ ID NO: 462 - DNA, 20 bp, Artificial Sequence
  source: /note="Description of Artificial Sequence: Synthetic oligonucleotide"
gatgcccagggccgggtcat

SEQ ID NO: 463 - DNA, 20 bp, Artificial Sequence
  source: /note="Description of Artificial Sequence: Synthetic oligonucleotide"
cgatgcccagggccgggtca

SEQ ID NO: 464 - DNA, 20 bp, Artificial Sequence
  source: /note="Description of Artificial Sequence: Synthetic oligonucleotide"
tccgatgcccagggccgggt

SEQ ID NO: 465 - DNA, 20 bp, Artificial Sequence
  source: /note="Description of Artificial Sequence: Synthetic oligonucleotide"
atccgatgcccagggccggg

SEQ ID NO: 466 - DNA, 20 bp, Artificial Sequence
  source: /note="Description of Artificial Sequence: Synthetic oligonucleotide"
catccgatgcccagggccgg

SEQ ID NO: 467 - DNA, 20 bp, Artificial Sequence
  source: /note="Description of Artificial Sequence: Synthetic oligonucleotide"
gcatccgatgcccagggccg

SEQ ID NO: 468 - DNA, 20 bp, Artificial Sequence
  source: /note="Description of Artificial Sequence: Synthetic oligonucleotide"
agcatccgatgcccagggcc

SEQ ID NO: 469 - DNA, 20 bp, Artificial Sequence
  source: /note="Description of Artificial Sequence: Synthetic oligonucleotide"
cagcatccgatgcccagggc

SEQ ID NO: 470 - DNA, 20 bp, Artificial Sequence
  source: /note="Description of Artificial Sequence: Synthetic oligonucleotide"
ccagcatccgatgcccaggg

SEQ ID NO: 471 - DNA, 20 bp, Artificial Sequence
  source: /note="Description of Artificial Sequence: Synthetic oligonucleotide"
cccagcatccgatgcccagg

SEQ ID NO: 472 - DNA, 20 bp, Artificial Sequence
  source: /note="Description of Artificial Sequence: Synthetic oligonucleotide"
ccccagcatccgatgcccag

SEQ ID NO: 473 - DNA, 20 bp, Artificial Sequence
  source: /note="Description of Artificial Sequence: Synthetic oligonucleotide"
cagccccagcatccgatgcc

SEQ ID NO: 474 - DNA, 20 bp, Artificial Sequence
  source: /note="Description of Artificial Sequence: Synthetic oligonucleotide"
gcagccccagcatccgatgc

SEQ ID NO: 475 - DNA, 20 bp, Artificial Sequence
  source: /note="Description of Artificial Sequence: Synthetic oligonucleotide"
ggcagccccagcatccgatg

SEQ ID NO: 476 - DNA, 20 bp, Artificial Sequence
  source: /note="Description of Artificial Sequence: Synthetic oligonucleotide"
gggcagccccagcatccgat

SEQ ID NO: 477 - DNA, 20 bp, Artificial Sequence
  source: /note="Description of Artificial Sequence: Synthetic oligonucleotide"
tgggcagccccagcatccga

SEQ ID NO: 478 - DNA, 20 bp, Artificial Sequence
  source: /note="Description of Artificial Sequence: Synthetic oligonucleotide"
ttgggcagccccagcatccg

SEQ ID NO: 479 - DNA, 20 bp, Artificial Sequence
  source: /note="Description of Artificial Sequence: Synthetic oligonucleotide"
tttgggcagccccagcatcc

SEQ ID NO: 480 - DNA, 20 bp, Artificial Sequence
  source: /note="Description of Artificial Sequence: Synthetic oligonucleotide"
ctttgggcagccccagcatc

SEQ ID NO: 481 - DNA, 20 bp, Artificial Sequence
  source: /note="Description of Artificial Sequence: Synthetic oligonucleotide"
gctttgggcagccccagcat

SEQ ID NO: 482 - DNA, 20 bp, Artificial Sequence
  source: /note="Description of Artificial Sequence: Synthetic oligonucleotide"
tgctttgggcagccccagca

SEQ ID NO: 483 - DNA, 20 bp, Artificial Sequence
  source: /note="Description of Artificial Sequence: Synthetic oligonucleotide"
ctgctttgggcagccccagc

SEQ ID NO: 484 - DNA, 20 bp, Artificial Sequence
  source: /note="Description of Artificial Sequence: Synthetic oligonucleotide"
tctgctttgggcagccccag

SEQ ID NO: 485 - DNA, 20 bp, Artificial Sequence
  source: /note="Description of Artificial Sequence: Synthetic oligonucleotide"
ttctgctttgggcagcccca

SEQ ID NO: 486 - DNA, 20 bp, Artificial Sequence
  source: /note="Description of Artificial Sequence: Synthetic oligonucleotide"
gttctgctttgggcagcccc

SEQ ID NO: 487 - DNA, 20 bp, Artificial Sequence
  source: /note="Description of Artificial Sequence: Synthetic oligonucleotide"
agttctgctttgggcagccc

SEQ ID NO: 488 - DNA, 20 bp, Artificial Sequence
  source: /note="Description of Artificial Sequence: Synthetic oligonucleotide"
tagttctgctttgggcagcc

SEQ ID NO: 489 - DNA, 20 bp, Artificial Sequence
  source: /note="Description of Artificial Sequence: Synthetic oligonucleotide"
gtagttctgctttgggcagc

SEQ ID NO: 490 - DNA, 20 bp, Artificial Sequence
  source: /note="Description of Artificial Sequence: Synthetic oligonucleotide"
agtagttctgctttgggcag

SEQ ID NO: 491 - DNA, 20 bp, Artificial Sequence
  source: /note="Description of Artificial Sequence: Synthetic oligonucleotide"
gagtagttctgctttgggca

SEQ ID NO: 492 - DNA, 20 bp, Artificial Sequence
  source: /note="Description of Artificial Sequence: Synthetic oligonucleotide"
ggagtagttctgctttgggc

SEQ ID NO: 493 - DNA, 20 bp, Artificial Sequence
  source: /note="Description of Artificial Sequence: Synthetic oligonucleotide"
aggagtagttctgctttggg

SEQ ID NO: 494 - DNA, 20 bp, Artificial Sequence
  source: /note="Description of Artificial Sequence: Synthetic oligonucleotide"
gaaggagtagttctgctttg

SEQ ID NO: 495 - DNA, 20 bp, Artificial Sequence
  source: /note="Description of Artificial Sequence: Synthetic oligonucleotide"
tgaaggagtagttctgcttt

SEQ ID NO: 496 - DNA, 20 bp, Artificial Sequence
  source: /note="Description of Artificial Sequence: Synthetic oligonucleotide"
ttgaaggagtagttctgctt

SEQ ID NO: 497 - DNA, 20 bp, Artificial Sequence
  source: /note="Description of Artificial Sequence: Synthetic oligonucleotide"
attgaaggagtagttctgct

SEQ ID NO: 498 - DNA, 20 bp, Artificial Sequence
  source: /note="Description of Artificial Sequence: Synthetic oligonucleotide"
cattgaaggagtagttctgc

SEQ ID NO: 499 - DNA, 20 bp, Artificial Sequence
  source: /note="Description of Artificial Sequence: Synthetic oligonucleotide"
tcattgaaggagtagttctg

SEQ ID NO: 500 - DNA, 20 bp, Artificial Sequence
  source: /note="Description of Artificial Sequence: Synthetic oligonucleotide"
gtcattgaaggagtagttct

SEQ ID NO: 501 - DNA, 20 bp, Artificial Sequence
  source: /note="Description of Artificial Sequence: Synthetic oligonucleotide"
agtcattgaaggagtagttc

SEQ ID NO: 502 - DNA, 20 bp, Artificial Sequence
  source: /note="Description of Artificial Sequence: Synthetic oligonucleotide"
gagtcattgaaggagtagtt

SEQ ID NO: 503 - DNA, 20 bp, Artificial Sequence
  source: /note="Description of Artificial Sequence: Synthetic oligonucleotide"
cgagtcattgaaggagtagt

SEQ ID NO: 504 - DNA, 20 bp, Artificial Sequence
  source: /note="Description of Artificial Sequence: Synthetic oligonucleotide"
acgagtcattgaaggagtag

SEQ ID NO: 505 - DNA, 20 bp, Artificial Sequence
  source: /note="Description of Artificial Sequence: Synthetic oligonucleotide"
gacgagtcattgaaggagta

SEQ ID NO: 506 - DNA, 20 bp, Artificial Sequence
  source: /note="Description of Artificial Sequence: Synthetic oligonucleotide"
ggacgagtcattgaaggagt

SEQ ID NO: 507 - DNA, 20 bp, Artificial Sequence
  source: /note="Description of Artificial Sequence: Synthetic oligonucleotide"
aggacgagtcattgaaggag

SEQ ID NO: 508 - DNA, 20 bp, Artificial Sequence
  source: /note="Description of Artificial Sequence: Synthetic oligonucleotide"
gaggacgagtcattgaagga

SEQ ID NO: 509 - DNA, 20 bp, Artificial Sequence
  source: /note="Description of Artificial Sequence: Synthetic oligonucleotide"
ggaggacgagtcattgaagg

SEQ ID NO: 510 - DNA, 20 bp, Artificial Sequence
  source: /note="Description of Artificial Sequence: Synthetic oligonucleotide"
cggaggacgagtcattgaag

SEQ ID NO: 511 - DNA, 20 bp, Artificial Sequence
  source: /note="Description of Artificial Sequence: Synthetic oligonucleotide"
tcggaggacgagtcattgaa

SEQ ID NO: 512 - DNA, 20 bp, Artificial Sequence
  source: /note="Description of Artificial Sequence: Synthetic oligonucleotide"
ctcggaggacgagtcattga

SEQ ID NO: 513 - DNA, 20 bp, Artificial Sequence
  source: /note="Description of Artificial Sequence: Synthetic oligonucleotide"
atctcggaggacgagtcatt

SEQ ID NO: 514 - DNA, 20 bp, Artificial Sequence
  source: /note="Description of Artificial Sequence: Synthetic oligonucleotide"
gatctcggaggacgagtcat

SEQ ID NO: 515 - DNA, 20 bp, Artificial Sequence
  source: /note="Description of Artificial Sequence: Synthetic oligonucleotide"
tgatctcggaggacgagtca

SEQ ID NO: 516 - DNA, 20 bp, Artificial Sequence
  source: /note="Description of Artificial Sequence: Synthetic oligonucleotide"
ttgatctcggaggacgagtc

SEQ ID NO: 517 - DNA, 20 bp, Artificial Sequence
  source: /note="Description of Artificial Sequence: Synthetic oligonucleotide"
gttgatctcggaggacgagt

SEQ ID NO: 518 - DNA, 20 bp, Artificial Sequence
  source: /note="Description of Artificial Sequence: Synthetic oligonucleotide"
agttgatctcggaggacgag

SEQ ID NO: 519 - DNA, 20 bp, Artificial Sequence
  source: /note="Description of Artificial Sequence: Synthetic oligonucleotide"
cagttgatctcggaggacga

SEQ ID NO: 520 - DNA, 20 bp, Artificial Sequence
  source: /note="Description of Artificial Sequence: Synthetic oligonucleotide"
ccagttgatctcggaggacg

SEQ ID NO: 521 - DNA, 20 bp, Artificial Sequence
  source: /note="Description of Artificial Sequence: Synthetic oligonucleotide"
cccagttgatctcggaggac

SEQ ID NO: 522 - DNA, 20 bp, Artificial Sequence
  source: /note="Description of Artificial Sequence: Synthetic oligonucleotide"
gcccagttgatctcggagga

SEQ ID NO: 523 - DNA, 20 bp, Artificial Sequence
  source: /note="Description of Artificial Sequence: Synthetic oligonucleotide"
agcccagttgatctcggagg

SEQ ID NO: 524 - DNA, 20 bp, Artificial Sequence
  source: /note="Description of Artificial Sequence: Synthetic oligonucleotide"
gagcccagttgatctcggag

SEQ ID NO: 525 - DNA, 20 bp, Artificial Sequence
  source: /note="Description of Artificial Sequence: Synthetic oligonucleotide"
ggagcccagttgatctcgga

SEQ ID NO: 526 - DNA, 20 bp, Artificial Sequence
  source: /note="Description of Artificial Sequence: Synthetic oligonucleotide"
aggagcccagttgatctcgg

SEQ ID NO: 527 - DNA, 20 bp, Artificial Sequence
  source: /note="Description of Artificial Sequence: Synthetic oligonucleotide"
taggagcccagttgatctcg

SEQ ID NO: 528 - DNA, 20 bp, Artificial Sequence
  source: /note="Description of Artificial Sequence: Synthetic oligonucleotide"
ataggagcccagttgatctc

SEQ ID NO: 529 - DNA, 20 bp, Artificial Sequence
  source: /note="Description of Artificial Sequence: Synthetic oligonucleotide"
aataggagcccagttgatct

SEQ ID NO: 530 - DNA, 20 bp, Artificial Sequence
  source: /note="Description of Artificial Sequence: Synthetic oligonucleotide"
gaataggagcccagttgatc

SEQ ID NO: 531 - DNA, 20 bp, Artificial Sequence
  source: /note="Description of Artificial Sequence: Synthetic oligonucleotide"
agaataggagcccagttgat

SEQ ID NO: 532 - DNA, 20 bp, Artificial Sequence
  source: /note="Description of Artificial Sequence: Synthetic oligonucleotide"
cagaataggagcccagttga

SEQ ID NO: 533 - DNA, 20 bp, Artificial Sequence
  source: /note="Description of Artificial Sequence: Synthetic oligonucleotide"
acagaataggagcccagttg

SEQ ID NO: 534 - DNA, 20 bp, Artificial Sequence
  source: /note="Description of Artificial Sequence: Synthetic oligonucleotide"
cacagaataggagcccagtt

SEQ ID NO: 535 - DNA, 20 bp, Artificial Sequence
  source: /note="Description of Artificial Sequence: Synthetic oligonucleotide"
ccacagaataggagcccagt

SEQ ID NO: 536 - DNA, 20 bp, Artificial Sequence
  source: /note="Description of Artificial Sequence: Synthetic oligonucleotide"
cccacagaataggagcccag

SEQ ID NO: 537 - DNA, 20 bp, Artificial Sequence
  source: /note="Description of Artificial Sequence: Synthetic oligonucleotide"
acccacagaataggagccca

SEQ ID NO: 538 - DNA, 20 bp, Artificial Sequence
  source: /note="Description of Artificial Sequence: Synthetic oligonucleotide"
cacccacagaataggagccc

SEQ ID NO: 539 - DNA, 20 bp, Artificial Sequence
  source: /note="Description of Artificial Sequence: Synthetic oligonucleotide"
ccacccacagaataggagcc

SEQ ID NO: 540 - DNA, 20 bp, Artificial Sequence
  source: /note="Description of Artificial Sequence: Synthetic oligonucleotide"
tccacccacagaataggagc

SEQ ID NO: 541 - DNA, 20 bp, Artificial Sequence
  source: /note="Description of Artificial Sequence: Synthetic oligonucleotide"
ctccacccacagaataggag

SEQ ID NO: 542 - DNA, 20 bp, Artificial Sequence
  source: /note="Description of Artificial Sequence: Synthetic oligonucleotide"
tctccacccacagaatagga

SEQ ID NO: 543 - DNA, 20 bp, Artificial Sequence
  source: /note="Description of Artificial Sequence: Synthetic oligonucleotide"
ctctccacccacagaatagg

SEQ ID NO: 544 - DNA, 20 bp, Artificial Sequence
  source: /note="Description of Artificial Sequence: Synthetic oligonucleotide"
tctctccacccacagaatag

SEQ ID NO: 545 - DNA, 20 bp, Artificial Sequence
  source: /note="Description of Artificial Sequence: Synthetic oligonucleotide"
ttctctccacccacagaata

SEQ ID NO: 546 - DNA, 20 bp, Artificial Sequence
  source: /note="Description of Artificial Sequence: Synthetic oligonucleotide"
tttctctccacccacagaat

SEQ ID NO: 547 - DNA, 20 bp, Artificial Sequence
  source: /note="Description of Artificial Sequence: Synthetic oligonucleotide"
ctttctctccacccacagaa

SEQ ID NO: 548 - DNA, 20 bp, Artificial Sequence
  source: /note="Description of Artificial Sequence: Synthetic oligonucleotide"
tctttctctccacccacaga

SEQ ID NO: 549 - DNA, 20 bp, Artificial Sequence
  source: /note="Description of Artificial Sequence: Synthetic oligonucleotide"
atctttctctccacccacag

SEQ ID NO: 550 - DNA, 20 bp, Artificial Sequence
  source: /note="Description of Artificial Sequence: Synthetic oligonucleotide"
catctttctctccacccaca

SEQ ID NO: 551 - DNA, 20 bp, Artificial Sequence
  source: /note="Description of Artificial Sequence: Synthetic oligonucleotide"
tcatctttctctccacccac

SEQ ID NO: 552 - DNA, 20 bp, Artificial Sequence
  source: /note="Description of Artificial Sequence: Synthetic oligonucleotide"
tgtcatctttctctccaccc

SEQ ID NO: 553 - DNA, 20 bp, Artificial Sequence
  source: /note="Description of Artificial Sequence: Synthetic oligonucleotide"
gtgtcatctttctctccacc

SEQ ID NO: 554 - DNA, 20 bp, Artificial Sequence
  source: /note="Description of Artificial Sequence: Synthetic oligonucleotide"
agtgtcatctttctctccac

SEQ ID NO: 555 - DNA, 20 bp, Artificial Sequence
  source: /note="Description of Artificial Sequence: Synthetic oligonucleotide"
cagtgtcatctttctctcca

SEQ ID NO: 556 - DNA, 20 bp, Artificial Sequence
  source: /note="Description of Artificial Sequence: Synthetic oligonucleotide"
acagtgtcatctttctctcc

SEQ ID NO: 557 - DNA, 20 bp, Artificial Sequence
  source: /note="Description of Artificial Sequence: Synthetic oligonucleotide"
cacagtgtcatctttctctc

SEQ ID NO: 558 - DNA, 20 bp, Artificial Sequence
  source: /note="Description of Artificial Sequence: Synthetic oligonucleotide"
ccacagtgtcatctttctct

SEQ ID NO: 559 - DNA, 20 bp, Artificial Sequence
  source: /note="Description of Artificial Sequence: Synthetic oligonucleotide"
cccacagtgtcatctttctc

SEQ ID NO: 560 - DNA, 20 bp, Artificial Sequence
  source: /note="Description of Artificial Sequence: Synthetic oligonucleotide"
gcccacagtgtcatctttct

SEQ ID NO: 561 - DNA, 20 bp, Artificial Sequence
  source: /note="Description of Artificial Sequence: Synthetic oligonucleotide"
cgcccacagtgtcatctttc

SEQ ID NO: 562 - DNA, 20 bp, Artificial Sequence
  source: /note="Description of Artificial Sequence: Synthetic oligonucleotide"
tcgcccacagtgtcatcttt

SEQ ID NO: 563 - DNA, 20 bp, Artificial Sequence
  source: /note="Description of Artificial Sequence: Synthetic oligonucleotide"
atcgcccacagtgtcatctt

SEQ ID NO: 564 - DNA, 20 bp, Artificial Sequence
  source: /note="Description of Artificial Sequence: Synthetic oligonucleotide"
gatcgcccacagtgtcatct

SEQ ID NO: 565 - DNA, 20 bp, Artificial Sequence
  source: /note="Description of Artificial Sequence: Synthetic oligonucleotide"
ggatcgcccacagtgtcatc

SEQ ID NO: 566 - DNA, 20 bp, Artificial Sequence
  source: /note="Description of Artificial Sequence: Synthetic oligonucleotide"
tggatcgcccacagtgtcat

SEQ ID NO: 567 - DNA, 20 bp, Artificial Sequence
  source: /note="Description of Artificial Sequence: Synthetic oligonucleotide"
ctggatcgcccacagtgtca

SEQ ID NO: 568 - DNA, 20 bp, Artificial Sequence
  source: /note="Description of Artificial Sequence: Synthetic oligonucleotide"
cctggatcgcccacagtgtc

SEQ ID NO: 569 - DNA, 20 bp, Artificial Sequence
  source: /note="Description of Artificial Sequence: Synthetic oligonucleotide"
acctggatcgcccacagtgt

SEQ ID NO: 570 - DNA, 20 bp, Artificial Sequence
  source: /note="Description of Artificial Sequence: Synthetic oligonucleotide"
gacctggatcgcccacagtg

SEQ ID NO: 571 - DNA, 20 bp, Artificial Sequence
  source: /note="Description of Artificial Sequence: Synthetic oligonucleotide"
tgacctggatcgcccacagt

SEQ ID NO: 572 - DNA, 20 bp, Artificial Sequence
  source: /note="Description of Artificial Sequence: Synthetic oligonucleotide"
atgacctggatcgcccacag

SEQ ID NO: 573 - DNA, 20 bp, Artificial Sequence
  source: /note="Description of Artificial Sequence: Synthetic oligonucleotide"
gatgacctggatcgcccaca

SEQ ID NO: 574 - DNA, 20 bp, Artificial Sequence
  source: /note="Description of Artificial Sequence: Synthetic oligonucleotide"
cgatgacctggatcgcccac

SEQ ID NO: 575 - DNA, 20 bp, Artificial Sequence
  source: /note="Description of Artificial Sequence: Synthetic oligonucleotide"
acgatgacctggatcgccca

SEQ ID NO: 576 - DNA, 20 bp, Artificial Sequence
  source: /note="Description of Artificial Sequence: Synthetic oligonucleotide"
cacgatgacctggatcgccc

SEQ ID NO: 577 - DNA, 20 bp, Artificial Sequence
  source: /note="Description of Artificial Sequence: Synthetic oligonucleotide"
ccacgatgacctggatcgcc

SEQ ID NO: 578 - DNA, 20 bp, Artificial Sequence
  source: /note="Description of Artificial Sequence: Synthetic oligonucleotide"
gccacgatgacctggatcgc

SEQ ID NO: 579 - DNA, 20 bp, Artificial Sequence
  source: /note="Description of Artificial Sequence: Synthetic oligonucleotide"
ggccacgatgacctggatcg

SEQ ID NO: 580 - DNA, 20 bp, Artificial Sequence
  source: /note="Description of Artificial Sequence: Synthetic oligonucleotide"
tggccacgatgacctggatc

SEQ ID NO: 581 - DNA, 20 bp, Artificial Sequence
  source: /note="Description of Artificial Sequence: Synthetic oligonucleotide"
atggccacgatgacctggat

SEQ ID NO: 582 - DNA, 20 bp, Artificial Sequence
  source: /note="Description of Artificial Sequence: Synthetic oligonucleotide"
tatggccacgatgacctgga

SEQ ID NO: 583 - DNA, 20 bp, Artificial Sequence
  source: /note="Description of Artificial Sequence: Synthetic oligonucleotide"
ttatggccacgatgacctgg

SEQ ID NO: 584 - DNA, 20 bp, Artificial Sequence
  source: /note="Description of Artificial Sequence: Synthetic oligonucleotide"
attatggccacgatgacctg

SEQ ID NO: 585 - DNA, 20 bp, Artificial Sequence
  source: /note="Description of Artificial Sequence: Synthetic oligonucleotide"
tattatggccacgatgacct

SEQ ID NO: 586 - DNA, 20 bp, Artificial Sequence
  source: /note="Description of Artificial Sequence: Synthetic oligonucleotide"
ttattatggccacgatgacc

SEQ ID NO: 587 - DNA, 20 bp, Artificial Sequence
  source: /note="Description of Artificial Sequence: Synthetic oligonucleotide"
cttattatggccacgatgac

SEQ ID NO: 588 - DNA, 20 bp, Artificial Sequence
  source: /note="Description of Artificial Sequence: Synthetic oligonucleotide"
gcttattatggccacgatga

SEQ ID NO: 589 - DNA, 20 bp, Artificial Sequence
  source: /note="Description of Artificial Sequence: Synthetic oligonucleotide"
agcttattatggccacgatg

SEQ ID NO: 590 - DNA, 20 bp, Artificial Sequence
  source: /note="Description of Artificial Sequence: Synthetic oligonucleotide"
aagcttattatggccacgat

SEQ ID NO: 591 - DNA, 20 bp, Artificial Sequence
  source: /note="Description of Artificial Sequence: Synthetic oligonucleotide"
gaagcttattatggccacga

SEQ ID NO: 592 - DNA, 20 bp, Artificial Sequence
  source: /note="Description of Artificial Sequence: Synthetic oligonucleotide"
ggaagcttattatggccacg

SEQ ID NO: 593 - DNA, 20 bp, Artificial Sequence
  source: /note="Description of Artificial Sequence: Synthetic oligonucleotide"
aggaagcttattatggccac

SEQ ID NO: 594 - DNA, 20 bp, Artificial Sequence
  source: /note="Description of Artificial Sequence: Synthetic oligonucleotide"
caggaagcttattatggcca

SEQ ID NO: 595 - DNA, 20 bp, Artificial Sequence
  source: /note="Description of Artificial Sequence: Synthetic oligonucleotide"
ccaggaagcttattatggcc

SEQ ID NO: 596 - DNA, 20 bp, Artificial Sequence
  source: /note="Description of Artificial Sequence: Synthetic oligonucleotide"
tccaggaagcttattatggc

SEQ ID NO: 597 - DNA, 20 bp, Artificial Sequence
  source: /note="Description of Artificial Sequence: Synthetic oligonucleotide"
tctccaggaagcttattatg

SEQ ID NO: 598 - DNA, 20 bp, Artificial Sequence
  source: /note="Description of Artificial Sequence: Synthetic oligonucleotide"
gtctccaggaagcttattat

SEQ ID NO: 599 - DNA, 20 bp, Artificial Sequence
  source: /note="Description of Artificial Sequence: Synthetic oligonucleotide"
cgtctccaggaagcttatta

SEQ ID NO: 600 - DNA, 20 bp, Artificial Sequence
  source: /note="Description of Artificial Sequence: Synthetic oligonucleotide"
tcgtctccaggaagcttatt

SEQ ID NO: 601 - DNA, 20 bp, Artificial Sequence
  source: /note="Description of Artificial Sequence: Synthetic oligonucleotide"
atcgtctccaggaagcttat

SEQ ID NO: 602 - DNA, 20 bp, Artificial Sequence
  source: /note="Description of Artificial Sequence: Synthetic oligonucleotide"
gcatcgtctccaggaagctt

SEQ ID NO: 603 - DNA, 20 bp, Artificial Sequence
  source: /note="Description of Artificial Sequence: Synthetic oligonucleotide"
agcatcgtctccaggaagct

SEQ ID NO: 604 - DNA, 20 bp, Artificial Sequence
  source: /note="Description of Artificial Sequence: Synthetic oligonucleotide"
aagcatcgtctccaggaagc

SEQ ID NO: 605 - DNA, 20 bp, Artificial Sequence
  source: /note="Description of Artificial Sequence: Synthetic oligonucleotide"
gaagcatcgtctccaggaag

SEQ ID NO: 606 - DNA, 20 bp, Artificial Sequence
  source: /note="Description of Artificial Sequence: Synthetic oligonucleotide"
agaagcatcgtctccaggaa

SEQ ID NO: 607 - DNA, 20 bp, Artificial Sequence
  source: /note="Description of Artificial Sequence: Synthetic oligonucleotide"
gagaagcatcgtctccagga

SEQ ID NO: 608 - DNA, 20 bp, Artificial Sequence
  source: /note="Description of Artificial Sequence: Synthetic oligonucleotide"
tgagaagcatcgtctccagg

SEQ ID NO: 609 - DNA, 20 bp, Artificial Sequence
  source: /note="Description of Artificial Sequence: Synthetic oligonucleotide"
atgagaagcatcgtctccag

SEQ ID NO: 610 - DNA, 20 bp, Artificial Sequence
  source: /note="Description of Artificial Sequence: Synthetic oligonucleotide"
gatgagaagcatcgtctcca

SEQ ID NO: 611 - DNA, 20 bp, Artificial Sequence
  source: /note="Description of Artificial Sequence: Synthetic oligonucleotide"
agatgagaagcatcgtctcc

SEQ ID NO: 612 - DNA, 20 bp, Artificial Sequence
  source: /note="Description of Artificial Sequence: Synthetic oligonucleotide"
tagatgagaagcatcgtctc

SEQ ID NO: 613 - DNA, 20 bp, Artificial Sequence
  source: /note="Description of Artificial Sequence: Synthetic oligonucleotide"
gtagatgagaagcatcgtct

SEQ ID NO: 614 - DNA, 20 bp, Artificial Sequence
  source: /note="Description of Artificial Sequence: Synthetic oligonucleotide"
ggtagatgagaagcatcgtc

SEQ ID NO: 615 - DNA, 20 bp, Artificial Sequence
  source: /note="Description of Artificial Sequence: Synthetic oligonucleotide"
aggtagatgagaagcatcgt

SEQ ID NO: 616 - DNA, 20 bp, Artificial Sequence
  source: /note="Description of Artificial Sequence: Synthetic oligonucleotide"
gaggtagatgagaagcatcg

SEQ ID NO: 617 - DNA, 20 bp, Artificial Sequence
  source: /note="Description of Artificial Sequence: Synthetic oligonucleotide"
tgaggtagatgagaagcatc

SEQ ID NO: 618 - DNA, 20 bp, Artificial Sequence
  source: /note="Description of Artificial Sequence: Synthetic oligonucleotide"
ctgaggtagatgagaagcat

SEQ ID NO: 619 - DNA, 20 bp, Artificial Sequence
  source: /note="Description of Artificial Sequence: Synthetic oligonucleotide"
gctgaggtagatgagaagca

SEQ ID NO: 620 - DNA, 20 bp, Artificial Sequence
  source: /note="Description of Artificial Sequence: Synthetic oligonucleotide"
agctgaggtagatgagaagc

SEQ ID NO: 621 - DNA, 20 bp, Artificial Sequence
  source: /note="Description of Artificial Sequence: Synthetic oligonucleotide"
tagctgaggtagatgagaag

SEQ ID NO: 622 - DNA, 20 bp, Artificial Sequence
  source: /note="Description of Artificial Sequence: Synthetic oligonucleotide"
gtagctgaggtagatgagaa

SEQ ID NO: 623 - DNA, 20 bp, Artificial Sequence
  source: /note="Description of Artificial Sequence: Synthetic oligonucleotide"
tgtagctgaggtagatgaga

SEQ ID NO: 624 - DNA, 20 bp, Artificial Sequence
  source: /note="Description of Artificial Sequence: Synthetic oligonucleotide"
ttgtagctgaggtagatgag

SEQ ID NO: 625 - DNA, 20 bp, Artificial Sequence
  source: /note="Description of Artificial Sequence: Synthetic oligonucleotide"
tttgtagctgaggtagatga

SEQ ID NO: 626 - DNA, 20 bp, Artificial Sequence
  source: /note="Description of Artificial Sequence: Synthetic oligonucleotide"
ctttgtagctgaggtagatg

SEQ ID NO: 627 - DNA, 20 bp, Artificial Sequence
  source: /note="Description of Artificial Sequence: Synthetic oligonucleotide"
cctttgtagctgaggtagat

SEQ ID NO: 628 - DNA, 20 bp, Artificial Sequence
  source: /note="Description of Artificial Sequence: Synthetic oligonucleotide"
gcctttgtagctgaggtaga

SEQ ID NO: 629 - DNA, 20 bp, Artificial Sequence
  source: /note="Description of Artificial Sequence: Synthetic oligonucleotide"
tgcctttgtagctgaggtag

SEQ ID NO: 630 - DNA, 20 bp, Artificial Sequence
  source: /note="Description of Artificial Sequence: Synthetic oligonucleotide"
ttgcctttgtagctgaggta

SEQ ID NO: 631 - DNA, 20 bp, Artificial Sequence
  source: /note="Description of Artificial Sequence: Synthetic oligonucleotide"
tgttgcctttgtagctgagg

SEQ ID NO: 632 - DNA, 20 bp, Artificial Sequence
  source: /note="Description of Artificial Sequence: Synthetic oligonucleotide"
atgttgcctttgtagctgag

SEQ ID NO: 633 - DNA, 20 bp, Artificial Sequence
  source: /note="Description of Artificial Sequence: Synthetic oligonucleotide"
gatgttgcctttgtagctga

SEQ ID NO: 634 - DNA, 20 bp, Artificial Sequence
  source: /note="Description of Artificial Sequence: Synthetic oligonucleotide"
agatgttgcctttgtagctg

SEQ ID NO: 635 - DNA, 20 bp, Artificial Sequence
  source: /note="Description of Artificial Sequence: Synthetic oligonucleotide"
cagatgttgcctttgtagct

SEQ ID NO: 636 - DNA, 20 bp, Artificial Sequence
  source: /note="Description of Artificial Sequence: Synthetic oligonucleotide"
ccagatgttgcctttgtagc

SEQ ID NO: 637 - DNA, 20 bp, Artificial Sequence
  source: /note="Description of Artificial Sequence: Synthetic oligonucleotide"
cccagatgttgcctttgtag

SEQ ID NO: 638 - DNA, 20 bp, Artificial Sequence
  source: /note="Description of Artificial Sequence: Synthetic oligonucleotide"
tcccagatgttgcctttgta

SEQ ID NO: 639 - DNA, 20 bp, Artificial Sequence
  source: /note="Description of Artificial Sequence: Synthetic oligonucleotide"
ctcccagatgttgcctttgt

SEQ ID NO: 640 - DNA, 20 bp, Artificial Sequence
  source: /note="Description of Artificial Sequence: Synthetic oligonucleotide"
gctcccagatgttgcctttg

SEQ ID NO: 641 - DNA, 20 bp, Artificial Sequence
  source: /note="Description of Artificial Sequence: Synthetic oligonucleotide"
tgctcccagatgttgccttt

SEQ ID NO: 642 - DNA, 20 bp, Artificial Sequence
  source: /note="Description of Artificial Sequence: Synthetic oligonucleotide"
ctgctcccagatgttgcctt

SEQ ID NO: 643 - DNA, 20 bp, Artificial Sequence
  source: /note="Description of Artificial Sequence: Synthetic oligonucleotide"
tctgctcccagatgttgcct

SEQ ID NO: 644 - DNA, 20 bp, Artificial Sequence
  source: /note="Description of Artificial Sequence: Synthetic oligonucleotide"
atctgctcccagatgttgcc

SEQ ID NO: 645 - DNA, 20 bp, Artificial Sequence
  source: /note="Description of Artificial Sequence: Synthetic oligonucleotide"
gatctgctcccagatgttgc

SEQ ID NO: 646 - DNA, 20 bp, Artificial Sequence
  source: /note="Description of Artificial Sequence: Synthetic oligonucleotide"
agatctgctcccagatgttg

SEQ ID NO: 647 - DNA, 20 bp, Artificial Sequence
  source: /note="Description of Artificial Sequence: Synthetic oligonucleotide"
aagatctgctcccagatgtt

SEQ ID NO: 648 - DNA, 20 bp, Artificial Sequence
  source: /note="Description of Artificial Sequence: Synthetic oligonucleotide"
gaagatctgctcccagatgt

SEQ ID NO: 649 - DNA, 20 bp, Artificial Sequence
  source: /note="Description of Artificial Sequence: Synthetic oligonucleotide"
ggaagatctgctcccagatg

SEQ ID NO: 650 - DNA, 20 bp, Artificial Sequence
  source: /note="Description of Artificial Sequence: Synthetic oligonucleotide"
cggaagatctgctcccagat

SEQ ID NO: 651 - DNA, 20 bp, Artificial Sequence
  source: /note="Description of Artificial Sequence: Synthetic oligonucleotide"
gcggaagatctgctcccaga

SEQ ID NO: 652 - DNA, 20 bp, Artificial Sequence
  source: /note="Description of Artificial Sequence: Synthetic oligonucleotide"
cgcggaagatctgctcccag

SEQ ID NO: 653 - DNA, 20 bp, Artificial Sequence
  source: /note="Description of Artificial Sequence: Synthetic oligonucleotide"
acgcggaagatctgctccca

SEQ ID NO: 654 - DNA, 20 bp, Artificial Sequence
  source: /note="Description of Artificial Sequence: Synthetic oligonucleotide"
cacgcggaagatctgctccc

SEQ ID NO: 655 - DNA, 20 bp, Artificial Sequence
  source: /note="Description of Artificial Sequence: Synthetic oligonucleotide"
acacgcggaagatctgctcc

SEQ ID NO: 656 - DNA, 20 bp, Artificial Sequence
  source: /note="Description of Artificial Sequence: Synthetic oligonucleotide"
gacacgcggaagatctgctc

SEQ ID NO: 657 - DNA, 20 bp, Artificial Sequence
  source: /note="Description of Artificial Sequence: Synthetic oligonucleotide"
ggacacgcggaagatctgct

SEQ ID NO: 658 - DNA, 20 bp, Artificial Sequence
  source: /note="Description of Artificial Sequence: Synthetic oligonucleotide"
aggacacgcggaagatctgc

SEQ ID NO: 659 - DNA, 20 bp, Artificial Sequence
  source: /note="Description of Artificial Sequence: Synthetic oligonucleotide"
aaggacacgcggaagatctg

SEQ ID NO: 660 - DNA, 20 bp, Artificial Sequence
  source: /note="Description of Artificial Sequence: Synthetic oligonucleotide"
gaaggacacgcggaagatct

SEQ ID NO: 661 - DNA, 20 bp, Artificial Sequence
  source: /note="Description of Artificial Sequence: Synthetic oligonucleotide"
cgaaggacacgcggaagatc

SEQ ID NO: 662 - DNA, 20 bp, Artificial Sequence
  source: /note="Description of Artificial Sequence: Synthetic oligonucleotide"
acgaaggacacgcggaagat

SEQ ID NO: 663 - DNA, 20 bp, Artificial Sequence
  source: /note="Description of Artificial Sequence: Synthetic oligonucleotide"
gacgaaggacacgcggaaga

SEQ ID NO: 664 - DNA, 20 bp, Artificial Sequence
  source: /note="Description of Artificial Sequence: Synthetic oligonucleotide"
ggacgaaggacacgcggaag

SEQ ID NO: 665 - DNA, 20 bp, Artificial Sequence
  source: /note="Description of Artificial Sequence: Synthetic oligonucleotide"
aggacgaaggacacgcggaa

SEQ ID NO: 666 - DNA, 20 bp, Artificial Sequence
  source: /note="Description of Artificial Sequence: Synthetic oligonucleotide"
caggacgaaggacacgcgga

SEQ ID NO: 667 - DNA, 20 bp, Artificial Sequence
  source: /note="Description of Artificial Sequence: Synthetic oligonucleotide"
ccaggacgaaggacacgcgg

SEQ ID NO: 668 - DNA, 20 bp, Artificial Sequence
  source: /note="Description of Artificial Sequence: Synthetic oligonucleotide"
tccaggacgaaggacacgcg

SEQ ID NO: 669 - DNA, 20 bp, Artificial Sequence
  source: /note="Description of Artificial Sequence: Synthetic oligonucleotide"
ctccaggacgaaggacacgc

SEQ ID NO: 670 - DNA, 20 bp, Artificial Sequence
  source: /note="Description of Artificial Sequence: Synthetic oligonucleotide"
tctccaggacgaaggacacg

SEQ ID NO: 671 - DNA, 20 bp, Artificial Sequence
  source: /note="Description of Artificial Sequence: Synthetic oligonucleotide"
catctccaggacgaaggaca

SEQ ID NO: 672 - DNA, 20 bp, Artificial Sequence
  source: /note="Description of Artificial Sequence: Synthetic oligonucleotide"
tcatctccaggacgaaggac

SEQ ID NO: 673 - DNA, 20 bp, Artificial Sequence
  source: /note="Description of Artificial Sequence: Synthetic oligonucleotide"
atcatctccaggacgaagga

SEQ ID NO: 674 - DNA, 20 bp, Artificial Sequence
  source: /note="Description of Artificial Sequence: Synthetic oligonucleotide"
gatcatctccaggacgaagg

SEQ ID NO: 675 - DNA, 20 bp, Artificial Sequence
  source: /note="Description of Artificial Sequence: Synthetic oligonucleotide"
tgatcatctccaggacgaag

SEQ ID NO: 676 - DNA, 20 bp, Artificial Sequence
  source: /note="Description of Artificial Sequence: Synthetic oligonucleotide"
ttgatcatctccaggacgaa

SEQ ID NO: 677 - DNA, 20 bp, Artificial Sequence
  source: /note="Description of Artificial Sequence: Synthetic oligonucleotide"
gttgatcatctccaggacga

SEQ ID NO: 678 - DNA, 20 bp, Artificial Sequence
  source: /note="Description of Artificial Sequence: Synthetic oligonucleotide"
tgttgatcatctccaggacg

SEQ ID NO: 679 - DNA, 20 bp, Artificial Sequence
  source: /note="Description of Artificial Sequence: Synthetic oligonucleotide"
gtgttgatcatctccaggac

SEQ ID NO: 680 - DNA, 20 bp, Artificial Sequence
  source: /note="Description of Artificial Sequence: Synthetic oligonucleotide"
agtgttgatcatctccagga

SEQ ID NO: 681 - DNA, 20 bp, Artificial Sequence
  source: /note="Description of Artificial Sequence: Synthetic oligonucleotide"
gagtgttgatcatctccagg

SEQ ID NO: 682 - DNA, 20 bp, Artificial Sequence
  source: /note="Description of Artificial Sequence: Synthetic oligonucleotide"
agagtgttgatcatctccag

SEQ ID NO: 683 - DNA, 20 bp, Artificial Sequence
  source: /note="Description of Artificial Sequence: Synthetic oligonucleotide"
cagagtgttgatcatctcca

SEQ ID NO: 684 - DNA, 20 bp, Artificial Sequence
  source: /note="Description of Artificial Sequence: Synthetic oligonucleotide"
gcagagtgttgatcatctcc

SEQ ID NO: 685 - DNA, 20 bp, Artificial Sequence
  source: /note="Description of Artificial Sequence: Synthetic oligonucleotide"
ggcagagtgttgatcatctc

SEQ ID NO: 686 - DNA, 20 bp, Artificial Sequence
  source: /note="Description of Artificial Sequence: Synthetic oligonucleotide"
gggcagagtgttgatcatct

SEQ ID NO: 687 - DNA, 20 bp, Artificial Sequence
  source: /note="Description of Artificial Sequence: Synthetic oligonucleotide"
agggcagagtgttgatcatc

SEQ ID NO: 688 - DNA, 20 bp, Artificial Sequence
  source: /note="Description of Artificial Sequence: Synthetic oligonucleotide"
aagggcagagtgttgatcat

SEQ ID NO: 689 - DNA, 20 bp, Artificial Sequence
  source: /note="Description of Artificial Sequence: Synthetic oligonucleotide"
gaagggcagagtgttgatca

SEQ ID NO: 690 - DNA, 20 bp, Artificial Sequence
  source: /note="Description of Artificial Sequence: Synthetic oligonucleotide"
tgaagggcagagtgttgatc

SEQ ID NO: 691 - DNA, 20 bp, Artificial Sequence
  source: /note="Description of Artificial Sequence: Synthetic oligonucleotide"
atgaagggcagagtgttgat

SEQ ID NO: 692 - DNA, 20 bp, Artificial Sequence
  source: /note="Description of Artificial Sequence: Synthetic oligonucleotide"
gatgaagggcagagtgttga

SEQ ID NO: 693 - DNA, 20 bp, Artificial Sequence
  source: /note="Description of Artificial Sequence: Synthetic oligonucleotide"
tgatgaagggcagagtgttg

SEQ ID NO: 694 - DNA, 20 bp, Artificial Sequence
  source: /note="Description of Artificial Sequence: Synthetic oligonucleotide"
atgatgaagggcagagtgtt

SEQ ID NO: 695 - DNA, 20 bp, Artificial Sequence
  source: /note="Description of Artificial Sequence: Synthetic oligonucleotide"
gatgatgaagggcagagtgt

SEQ ID NO: 696 - DNA, 20 bp, Artificial Sequence
  source: /note="Description of Artificial Sequence: Synthetic oligonucleotide"
tgatgatgaagggcagagtg

SEQ ID NO: 697 - DNA, 20 bp, Artificial Sequence
  source: /note="Description of Artificial Sequence: Synthetic oligonucleotide"
gtgatgatgaagggcagagt

SEQ ID NO: 698 - DNA, 20 bp, Artificial Sequence
  source: /note="Description of Artificial Sequence: Synthetic oligonucleotide"
cgtgatgatgaagggcagag

SEQ ID NO: 699 - DNA, 20 bp, Artificial Sequence
  source: /note="Description of Artificial Sequence: Synthetic oligonucleotide"
atcgtgatgatgaagggcag

SEQ ID NO: 700 - DNA, 20 bp, Artificial Sequence
  source: /note="Description of Artificial Sequence: Synthetic oligonucleotide"
gatcgtgatgatgaagggca

SEQ ID NO: 701 - DNA, 20 bp, Artificial Sequence
  source: /note="Description of Artificial Sequence: Synthetic oligonucleotide"
agatcgtgatgatgaagggc

SEQ ID NO: 702 - DNA, 20 bp, Artificial Sequence
  source: /note="Description of Artificial Sequence: Synthetic oligonucleotide"
aagatcgtgatgatgaaggg

SEQ ID NO: 703 - DNA, 20 bp, Artificial Sequence
  source: /note="Description of Artificial Sequence: Synthetic oligonucleotide"
gaagatcgtgatgatgaagg

SEQ ID NO: 704 - DNA, 20 bp, Artificial Sequence
  source: /note="Description of Artificial Sequence: Synthetic oligonucleotide"
agaagatcgtgatgatgaag

SEQ ID NO: 705 - DNA, 20 bp, Artificial Sequence
  source: /note="Description of Artificial Sequence: Synthetic oligonucleotide"
cagaagatcgtgatgatgaa

SEQ ID NO: 706 - DNA, 20 bp, Artificial Sequence
  source: /note="Description of Artificial Sequence: Synthetic oligonucleotide"
ccagaagatcgtgatgatga

SEQ ID NO: 707 - DNA, 20 bp, Artificial Sequence
  source: /note="Description of Artificial Sequence: Synthetic oligonucleotide"
gccagaagatcgtgatgatg

SEQ ID NO: 708 - DNA, 20 bp, Artificial Sequence
  source: /note="Description of Artificial Sequence: Synthetic oligonucleotide"
ggccagaagatcgtgatgat

SEQ ID NO: 709 - DNA, 20 bp, Artificial Sequence
  source: /note="Description of Artificial Sequence: Synthetic oligonucleotide"
cggccagaagatcgtgatga

SEQ ID NO: 710 - DNA, 20 bp, Artificial Sequence
  source: /note="Description of Artificial Sequence: Synthetic oligonucleotide"
gcggccagaagatcgtgatg

SEQ ID NO: 711 - DNA, 20 bp, Artificial Sequence
  source: /note="Description of Artificial Sequence: Synthetic oligonucleotide"
ggcggccagaagatcgtgat

SEQ ID NO: 712 - DNA, 20 bp, Artificial Sequence
  source: /note="Description of Artificial Sequence: Synthetic oligonucleotide"
cggcggccagaagatcgtga

SEQ ID NO: 713 - DNA, 20 bp, Artificial Sequence
  source: /note="Description of Artificial Sequence: Synthetic oligonucleotide"
gcggcggccagaagatcgtg

SEQ ID NO: 714 - DNA, 20 bp, Artificial Sequence
  source: /note="Description of Artificial Sequence: Synthetic oligonucleotide"
agcggcggccagaagatcgt

SEQ ID NO: 715 - DNA, 20 bp, Artificial Sequence
  source: /note="Description of Artificial Sequence: Synthetic oligonucleotide"
cagcggcggccagaagatcg

SEQ ID NO: 716 - DNA, 20 bp, Artificial Sequence
  source: /note="Description of Artificial Sequence: Synthetic oligonucleotide"
gcagcggcggccagaagatc

SEQ ID NO: 717 - DNA, 20 bp, Artificial Sequence
  source: /note="Description of Artificial Sequence: Synthetic oligonucleotide"
cgcagcggcggccagaagat

SEQ ID NO: 718 - DNA, 20 bp, Artificial Sequence
  source: /note="Description of Artificial Sequence: Synthetic oligonucleotide"
ccgcagcggcggccagaaga

SEQ ID NO: 719 - DNA, 20 bp, Artificial Sequence
  source: /note="Description of Artificial Sequence: Synthetic oligonucleotide"
tccgcagcggcggccagaag

SEQ ID NO: 720 - DNA, 20 bp, Artificial Sequence
  source: /note="Description of Artificial Sequence: Synthetic oligonucleotide"
ttccgcagcggcggccagaa

SEQ ID NO: 721 - DNA, 20 bp, Artificial Sequence
  source: /note="Description of Artificial Sequence: Synthetic oligonucleotide"
gttccgcagcggcggccaga

SEQ ID NO: 722 - DNA, 20 bp, Artificial Sequence
  source: /note="Description of Artificial Sequence: Synthetic oligonucleotide"
aggttccgcagcggcggcca

SEQ ID NO: 723 - DNA, 20 bp, Artificial Sequence
  source: /note="Description of Artificial Sequence: Synthetic oligonucleotide"
acaggttccgcagcggcggc

SEQ ID NO: 724 - DNA, 20 bp, Artificial Sequence
  source: /note="Description of Artificial Sequence: Synthetic oligonucleotide"
aacaggttccgcagcggcgg

SEQ ID NO: 725 - DNA, 20 bp, Artificial Sequence
  source: /note="Description of Artificial Sequence: Synthetic oligonucleotide"
gaacaggttccgcagcggcg

SEQ ID NO: 726 - DNA, 20 bp, Artificial Sequence
  source: /note="Description of Artificial Sequence: Synthetic oligonucleotide"
tgaacaggttccgcagcggc

SEQ ID NO: 727 - DNA, 20 bp, Artificial Sequence
  source: /note="Description of Artificial Sequence: Synthetic oligonucleotide"
atgaacaggttccgcagcgg

SEQ ID NO: 728 - DNA, 20 bp, Artificial Sequence
  source: /note="Description of Artificial Sequence: Synthetic oligonucleotide"
gatgaacaggttccgcagcg

SEQ ID NO: 729 - DNA, 20 bp, Artificial Sequence
  source: /note="Description of Artificial Sequence: Synthetic oligonucleotide"
ggatgaacaggttccgcagc

SEQ ID NO: 730 - DNA, 20 bp, Artificial Sequence
  source: /note="Description of Artificial Sequence: Synthetic oligonucleotide"
cagcagttcagaaagacggg

SEQ ID NO: 731 - DNA, 20 bp, Artificial Sequence
  source: /note="Description of Artificial Sequence: Synthetic oligonucleotide"
ccagcagttcagaaagacgg

SEQ ID NO: 732 - DNA, 20 bp, Artificial Sequence
  source: /note="Description of Artificial Sequence: Synthetic oligonucleotide"
gccagcagttcagaaagacg

SEQ ID NO: 733 - DNA, 20 bp, Artificial Sequence
  source: /note="Description of Artificial Sequence: Synthetic oligonucleotide"
agccagcagttcagaaagac

SEQ ID NO: 734 - DNA, 20 bp, Artificial Sequence
  source: /note="Description of Artificial Sequence: Synthetic oligonucleotide"
cagccagcagttcagaaaga

SEQ ID NO: 735 - DNA, 20 bp, Artificial Sequence
  source: /note="Description of Artificial Sequence: Synthetic oligonucleotide"
ccagccagcagttcagaaag

SEQ ID NO: 736 - DNA, 20 bp, Artificial Sequence
  source: /note="Description of Artificial Sequence: Synthetic oligonucleotide"
gccagccagcagttcagaaa

SEQ ID NO: 737 - DNA, 20 bp, Artificial Sequence
  source: /note="Description of Artificial Sequence: Synthetic oligonucleotide"
tggccagccagcagttcaga

SEQ ID NO: 738 - DNA, 20 bp, Artificial Sequence
  source: /note="Description of Artificial Sequence: Synthetic oligonucleotide"
ttggccagccagcagttcag

SEQ ID NO: 739 - DNA, 20 bp, Artificial Sequence
  source: /note="Description of Artificial Sequence: Synthetic oligonucleotide"
cttggccagccagcagttca

SEQ ID NO: 740 - DNA, 20 bp, Artificial Sequence
  source: /note="Description of Artificial Sequence: Synthetic oligonucleotide"
gcttggccagccagcagttc

SEQ ID NO: 741 - DNA, 20 bp, Artificial Sequence
  source: /note="Description of Artificial Sequence: Synthetic oligonucleotide"
tgcttggccagccagcagtt

SEQ ID NO: 742 - DNA, 20 bp, Artificial Sequence
  source: /note="Description of Artificial Sequence: Synthetic oligonucleotide"
gtgcttggccagccagcagt

SEQ ID NO: 743 - DNA, 20 bp, Artificial Sequence
  source: /note="Description of Artificial Sequence: Synthetic oligonucleotide"
cgtgcttggccagccagcag

SEQ ID NO: 744 - DNA, 20 bp, Artificial Sequence
  source: /note="Description of Artificial Sequence: Synthetic oligonucleotide"
gcgtgcttggccagccagca

SEQ ID NO: 745 - DNA, 20 bp, Artificial Sequence
  source: /note="Description of Artificial Sequence: Synthetic oligonucleotide"
cgcgtgcttggccagccagc

SEQ ID NO: 746 - DNA, 20 bp, Artificial Sequence
  source: /note="Description of Artificial Sequence: Synthetic oligonucleotide"
gcgcgtgcttggccagccag

SEQ ID NO: 747 - DNA, 20 bp, Artificial Sequence
  source: /note="Description of Artificial Sequence: Synthetic oligonucleotide"
agcgcgtgcttggccagcca

SEQ ID NO: 748 - DNA, 20 bp, Artificial Sequence
  source: /note="Description of Artificial Sequence: Synthetic oligonucleotide"
cagcgcgtgcttggccagcc

SEQ ID NO: 749 - DNA, 20 bp, Artificial Sequence
  source: /note="Description of Artificial Sequence: Synthetic oligonucleotide"
ccagcgcgtgcttggccagc

SEQ ID NO: 750 - DNA, 20 bp, Artificial Sequence
  source: /note="Description of Artificial Sequence: Synthetic oligonucleotide"
tccagcgcgtgcttggccag

SEQ ID NO: 751 - DNA, 20 bp, Artificial Sequence
  source: /note="Description of Artificial Sequence: Synthetic oligonucleotide"
ttccagcgcgtgcttggcca

SEQ ID NO: 752 - DNA, 20 bp, Artificial Sequence
  source: /note="Description of Artificial Sequence: Synthetic oligonucleotide"
tttccagcgcgtgcttggcc

SEQ ID NO: 753 - DNA, 20 bp, Artificial Sequence
  source: /note="Description of Artificial Sequence: Synthetic oligonucleotide"
ttttccagcgcgtgcttggc

SEQ ID NO: 754 - DNA, 20 bp, Artificial Sequence
  source: /note="Description of Artificial Sequence: Synthetic oligonucleotide"
gttttccagcgcgtgcttgg

SEQ ID NO: 755 - DNA, 20 bp, Artificial Sequence
  source: /note="Description of Artificial Sequence: Synthetic oligonucleotide"
tgttttccagcgcgtgcttg

SEQ ID NO: 756 - DNA, 20 bp, Artificial Sequence
  source: /note="Description of Artificial Sequence: Synthetic oligonucleotide"
atgttttccagcgcgtgctt

SEQ ID NO: 757 - DNA, 20 bp, Artificial Sequence
  source: /note="Description of Artificial Sequence: Synthetic oligonucleotide"
catgttttccagcgcgtgct

SEQ ID NO: 758 - DNA, 20 bp, Artificial Sequence
  source: /note="Description of Artificial Sequence: Synthetic oligonucleotide"
tcatgttttccagcgcgtgc

SEQ ID NO: 759 - DNA, 20 bp, Artificial Sequence
  source: /note="Description of Artificial Sequence: Synthetic oligonucleotide"
atcatgttttccagcgcgtg

SEQ ID NO: 760 - DNA, 20 bp, Artificial Sequence
  source: /note="Description of Artificial Sequence: Synthetic oligonucleotide"
aatcatgttttccagcgcgt

SEQ ID NO: 761 - DNA, 20 bp, Artificial Sequence
  source: /note="Description of Artificial Sequence: Synthetic oligonucleotide"
taatcatgttttccagcgcg

SEQ ID NO: 762 - DNA, 20 bp, Artificial Sequence
  source: /note="Description of Artificial Sequence: Synthetic oligonucleotide"
ttaatcatgttttccagcgc

SEQ ID NO: 763 - DNA, 20 bp, Artificial Sequence
  source: /note="Description of Artificial Sequence: Synthetic oligonucleotide"
attaatcatgttttccagcg

SEQ ID NO: 764 - DNA, 20 bp, Artificial Sequence
  source: /note="Description of Artificial Sequence: Synthetic oligonucleotide"
cattaatcatgttttccagc

SEQ ID NO: 765 - DNA, 20 bp, Artificial Sequence
  source: /note="Description of Artificial Sequence: Synthetic oligonucleotide"
gtggaagtcattaatcatgt

SEQ ID NO: 766 - DNA, 20 bp, Artificial Sequence
  source: /note="Description of Artificial Sequence: Synthetic oligonucleotide"
ggtggaagtcattaatcatg

SEQ ID NO: 767 - DNA, 20 bp, Artificial Sequence
  source: /note="Description of Artificial Sequence: Synthetic oligonucleotide"
cggtggaagtcattaatcat

SEQ ID NO: 768 - DNA, 20 bp, Artificial Sequence
  source: /note="Description of Artificial Sequence: Synthetic oligonucleotide"
acggtggaagtcattaatca

SEQ ID NO: 769 - DNA, 20 bp, Artificial Sequence
  source: /note="Description of Artificial Sequence: Synthetic oligonucleotide"
cacggtggaagtcattaatc

SEQ ID NO: 770 - DNA, 20 bp, Artificial Sequence
  source: /note="Description of Artificial Sequence: Synthetic oligonucleotide"
gcacggtggaagtcattaat

SEQ ID NO: 771 - DNA, 20 bp, Artificial Sequence
  source: /note="Description of Artificial Sequence: Synthetic oligonucleotide"
ggcacggtggaagtcattaa

SEQ ID NO: 772 - DNA, 20 bp, Artificial Sequence
  source: /note="Description of Artificial Sequence: Synthetic oligonucleotide"
tggcacggtggaagtcatta

SEQ ID NO: 773 - DNA, 20 bp, Artificial Sequence
  source: /note="Description of Artificial Sequence: Synthetic oligonucleotide"
atggcacggtggaagtcatt

SEQ ID NO: 774 - DNA, 20 bp, Artificial Sequence
  source: /note="Description of Artificial Sequence: Synthetic oligonucleotide"
gatggcacggtggaagtcat

SEQ ID NO: 775 - DNA, 20 bp, Artificial Sequence
  source: /note="Description of Artificial Sequence: Synthetic oligonucleotide"
ggatggcacggtggaagtca

SEQ ID NO: 776 - DNA, 20 bp, Artificial Sequence
  source: /note="Description of Artificial Sequence: Synthetic oligonucleotide"
caggatggcacggtggaagt

SEQ ID NO: 777 - DNA, 20 bp, Artificial Sequence
  source: /note="Description of Artificial Sequence: Synthetic oligonucleotide"
gcaggatggcacggtggaag

SEQ ID NO: 778 - DNA, 20 bp, Artificial Sequence
  source: /note="Description of Artificial Sequence: Synthetic oligonucleotide"
cgcaggatggcacggtggaa

SEQ ID NO: 779 - DNA, 20 bp, Artificial Sequence
  source: /note="Description of Artificial Sequence: Synthetic oligonucleotide"
ccgcaggatggcacggtgga

SEQ ID NO: 780 - DNA, 20 bp, Artificial Sequence
  source: /note="Description of Artificial Sequence: Synthetic oligonucleotide"
tccgcaggatggcacggtgg

SEQ ID NO: 781 - DNA, 20 bp, Artificial Sequence
  source: /note="Description of Artificial Sequence: Synthetic oligonucleotide"
gtccgcaggatggcacggtg

SEQ ID NO: 782 - DNA, 20 bp, Artificial Sequence
  source: /note="Description of Artificial Sequence: Synthetic oligonucleotide"
tgtccgcaggatggcacggt

SEQ ID NO: 783 - DNA, 20 bp, Artificial Sequence
  source: /note="Description of Artificial Sequence: Synthetic oligonucleotide"
gtgtccgcaggatggcacgg

SEQ ID NO: 784 - DNA, 20 bp, Artificial Sequence
  source: /note="Description of Artificial Sequence: Synthetic oligonucleotide"
tgtgtccgcaggatggcacg

SEQ ID NO: 785 - DNA, 20 bp, Artificial Sequence
  source: /note="Description of Artificial Sequence: Synthetic oligonucleotide"
ctgtgtccgcaggatggcac

SEQ ID NO: 786 - DNA, 20 bp, Artificial Sequence
  source: /note="Description of Artificial Sequence: Synthetic oligonucleotide"
actgtgtccgcaggatggca

SEQ ID NO: 787 - DNA, 20 bp, Artificial Sequence
  source: /note="Description of Artificial Sequence: Synthetic oligonucleotide"
gactgtgtccgcaggatggc

SEQ ID NO: 788 - DNA, 20 bp, Artificial Sequence
  source: /note="Description of Artificial Sequence: Synthetic oligonucleotide"
tgactgtgtccgcaggatgg

SEQ ID NO: 789 - DNA, 20 bp, Artificial Sequence
  source: /note="Description of Artificial Sequence: Synthetic oligonucleotide"
ctgactgtgtccgcaggatg

SEQ ID NO: 790 - DNA, 20 bp, Artificial Sequence
  source: /note="Description of Artificial Sequence: Synthetic oligonucleotide"
gctgactgtgtccgcaggat

SEQ ID NO: 791 - DNA, 20 bp, Artificial Sequence
  source: /note="Description of Artificial Sequence: Synthetic oligonucleotide"
ggctgactgtgtccgcagga

SEQ ID NO: 792 - DNA, 20 bp, Artificial Sequence
  source: /note="Description of Artificial Sequence: Synthetic oligonucleotide"
tggctgactgtgtccgcagg

SEQ ID NO: 793 - DNA, 20 bp, Artificial Sequence
  source: /note="Description of Artificial Sequence: Synthetic oligonucleotide"
atggctgactgtgtccgcag

SEQ ID NO: 794 - DNA, 20 bp, Artificial Sequence
  source: /note="Description of Artificial Sequence: Synthetic oligonucleotide"
catggctgactgtgtccgca

SEQ ID NO: 795 - DNA, 20 bp, Artificial Sequence
  source: /note="Description of Artificial Sequence: Synthetic oligonucleotide"
acatggctgactgtgtccgc

SEQ ID NO: 796 - DNA, 20 bp, Artificial Sequence
  source: /note="Description of Artificial Sequence: Synthetic oligonucleotide"
aacatggctgactgtgtccg

SEQ ID NO: 797 - DNA, 20 bp, Artificial Sequence
  source: /note="Description of Artificial Sequence: Synthetic oligonucleotide"
gaacatggctgactgtgtcc

SEQ ID NO: 798 - DNA, 20 bp, Artificial Sequence
  source: /note="Description of Artificial Sequence: Synthetic oligonucleotide"
tgaacatggctgactgtgtc

SEQ ID NO: 799 - DNA, 20 bp, Artificial Sequence
  source: /note="Description of Artificial Sequence: Synthetic oligonucleotide"
ttgaacatggctgactgtgt

SEQ ID NO: 800 - DNA, 20 bp, Artificial Sequence
  source: /note="Description of Artificial Sequence: Synthetic oligonucleotide"
gttgaacatggctgactgtg

SEQ ID NO: 801 - DNA, 20 bp, Artificial Sequence
  source: /note="Description of Artificial Sequence: Synthetic oligonucleotide"
ggttgaacatggctgactgt

SEQ ID NO: 802 - DNA, 20 bp, Artificial Sequence
  source: /note="Description of Artificial Sequence: Synthetic oligonucleotide"
tggttgaacatggctgactg

SEQ ID NO: 803 - DNA, 20 bp, Artificial Sequence
  source: /note="Description of Artificial Sequence: Synthetic oligonucleotide"
ctggttgaacatggctgact

SEQ ID NO: 804 - DNA, 20 bp, Artificial Sequence
  source: /note="Description of Artificial Sequence: Synthetic oligonucleotide"
cctggttgaacatggctgac

SEQ ID NO: 805 - DNA, 20 bp, Artificial Sequence
  source: /note="Description of Artificial Sequence: Synthetic oligonucleotide"
acctggttgaacatggctga

SEQ ID NO: 806 - DNA, 20 bp, Artificial Sequence
  source: /note="Description of Artificial Sequence: Synthetic oligonucleotide"
gacctggttgaacatggctg

SEQ ID NO: 807 - DNA, 20 bp, Artificial Sequence
  source: /note="Description of Artificial Sequence: Synthetic oligonucleotide"
ggacctggttgaacatggct

SEQ ID NO: 808 - DNA, 20 bp, Artificial Sequence
  source: /note="Description of Artificial Sequence: Synthetic oligonucleotide"
aggacctggttgaacatggc

SEQ ID NO: 809 - DNA, 20 bp, Artificial Sequence
  source: /note="Description of Artificial Sequence: Synthetic oligonucleotide"
gaggacctggttgaacatgg

SEQ ID NO: 810 - DNA, 20 bp, Artificial Sequence
  source: /note="Description of Artificial Sequence: Synthetic oligonucleotide"
tgaggacctggttgaacatg

SEQ ID NO: 811 - DNA, 20 bp, Artificial Sequence
  source: /note="Description of Artificial Sequence: Synthetic oligonucleotide"
atgaggacctggttgaacat

SEQ ID NO: 812 - DNA, 20 bp, Artificial Sequence
  source: /note="Description of Artificial Sequence: Synthetic oligonucleotide"
gatgaggacctggttgaaca

SEQ ID NO: 813 - DNA, 20 bp, Artificial Sequence
  source: /note="Description of Artificial Sequence: Synthetic oligonucleotide"
ggatgaggacctggttgaac

SEQ ID NO: 814 - DNA, 20 bp, Artificial Sequence
  source: /note="Description of Artificial Sequence: Synthetic oligonucleotide"
aggatgaggacctggttgaa

SEQ ID NO: 815 - DNA, 20 bp, Artificial Sequence
  source: /note="Description of Artificial Sequence: Synthetic oligonucleotide"
agaggatgaggacctggttg

SEQ ID NO: 816 - DNA, 20 bp, Artificial Sequence
  source: /note="Description of Artificial Sequence: Synthetic oligonucleotide"
aagaggatgaggacctggtt

SEQ ID NO: 817 - DNA, 20 bp, Artificial Sequence
  source: /note="Description of Artificial Sequence: Synthetic oligonucleotide"
gaagaggatgaggacctggt

SEQ ID NO: 818 - DNA, 20 bp, Artificial Sequence
  source: /note="Description of Artificial Sequence: Synthetic oligonucleotide"
agaagaggatgaggacctgg

SEQ ID NO: 819 - DNA, 20 bp, Artificial Sequence
  source: /note="Description of Artificial Sequence: Synthetic oligonucleotide"
cagaagaggatgaggacctg

SEQ ID NO: 820 - DNA, 20 bp, Artificial Sequence
  source: /note="Description of Artificial Sequence: Synthetic oligonucleotide"
gcagaagaggatgaggacct

SEQ ID NO: 821 - DNA, 20 bp, Artificial Sequence
  source: /note="Description of Artificial Sequence: Synthetic oligonucleotide"
tgcagaagaggatgaggacc

SEQ ID NO: 822 - DNA, 20 bp, Artificial Sequence
  source: /note="Description of Artificial Sequence: Synthetic oligonucleotide"
gtgcagaagaggatgaggac

SEQ ID NO: 823 - DNA, 20 bp, Artificial Sequence
  source: /note="Description of Artificial Sequence: Synthetic oligonucleotide"
ggtgcagaagaggatgagga

SEQ ID NO: 824 - DNA, 20 bp, Artificial Sequence
  source: /note="Description of Artificial Sequence: Synthetic oligonucleotide"
gggtgcagaagaggatgagg

SEQ ID NO: 825 - DNA, 20 bp, Artificial Sequence
  source: /note="Description of Artificial Sequence: Synthetic oligonucleotide"
agggtgcagaagaggatgag

SEQ ID NO: 826 - DNA, 20 bp, Artificial Sequence
  source: /note="Description of Artificial Sequence: Synthetic oligonucleotide"
cagggtgcagaagaggatga

SEQ ID NO: 827 - DNA, 20 bp, Artificial Sequence
  source: /note="Description of Artificial Sequence: Synthetic oligonucleotide"
gcagggtgcagaagaggatg

SEQ ID NO: 828 - DNA, 20 bp, Artificial Sequence
  source: /note="Description of Artificial Sequence: Synthetic oligonucleotide"
agcagggtgcagaagaggat

SEQ ID NO: 829 - DNA, 20 bp, Artificial Sequence
  source: /note="Description of Artificial Sequence: Synthetic oligonucleotide"
cagcagggtgcagaagagga

SEQ ID NO: 830 - DNA, 20 bp, Artificial Sequence
  source: /note="Description of Artificial Sequence: Synthetic oligonucleotide"
acagcagggtgcagaagagg

SEQ ID NO: 831 - DNA, 20 bp, Artificial Sequence
  source: /note="Description of Artificial Sequence: Synthetic oligonucleotide"
cacagcagggtgcagaagag

SEQ ID NO: 832 - DNA, 20 bp, Artificial Sequence
  source: /note="Description of Artificial Sequence: Synthetic oligonucleotide"
gcacagcagggtgcagaaga

SEQ ID NO: 833 - DNA, 20 bp, Artificial Sequence
  source: /note="Description of Artificial Sequence: Synthetic oligonucleotide"
ggcacagcagggtgcagaag

SEQ ID NO: 834 - DNA, 20 bp, Artificial Sequence
  source: /note="Description of Artificial Sequence: Synthetic oligonucleotide"
aggcacagcagggtgcagaa

SEQ ID NO: 835 - DNA, 20 bp, Artificial Sequence
  source: /note="Description of Artificial Sequence: Synthetic oligonucleotide"
gaggcacagcagggtgcaga

SEQ ID NO: 836 - DNA, 20 bp, Artificial Sequence
  source: /note="Description of Artificial Sequence: Synthetic oligonucleotide"
cgaggcacagcagggtgcag

SEQ ID NO: 837 - DNA, 20 bp, Artificial Sequence
  source: /note="Description of Artificial Sequence: Synthetic oligonucleotide"
acgaggcacagcagggtgca

SEQ ID NO: 838 - DNA, 20 bp, Artificial Sequence
  source: /note="Description of Artificial Sequence: Synthetic oligonucleotide"
aacgaggcacagcagggtgc

SEQ ID NO: 839 - DNA, 20 bp, Artificial Sequence
  source: /note="Description of Artificial Sequence: Synthetic oligonucleotide"
aaacgaggcacagcagggtg

SEQ ID NO: 840 - DNA, 20 bp, Artificial Sequence
  source: /note="Description of Artificial Sequence: Synthetic oligonucleotide"
gaaaacgaggcacagcaggg

SEQ ID NO: 841 - DNA, 20 bp, Artificial Sequence
  source: /note="Description of Artificial Sequence: Synthetic oligonucleotide"
tgaaaacgaggcacagcagg

SEQ ID NO: 842 - DNA, 20 bp, Artificial Sequence
  source: /note="Description of Artificial Sequence: Synthetic oligonucleotide"
gtgaaaacgaggcacagcag

SEQ ID NO: 843 - DNA, 20 bp, Artificial Sequence
  source: /note="Description of Artificial Sequence: Synthetic oligonucleotide"
cgtgaaaacgaggcacagca

SEQ ID NO: 844 - DNA, 20 bp, Artificial Sequence
  source: /note="Description of Artificial Sequence: Synthetic oligonucleotide"
ccgtgaaaacgaggcacagc

SEQ ID NO: 845 - DNA, 20 bp, Artificial Sequence
  source: /note="Description of Artificial Sequence: Synthetic oligonucleotide"
cccgtgaaaacgaggcacag

SEQ ID NO: 846 - DNA, 20 bp, Artificial Sequence
  source: /note="Description of Artificial Sequence: Synthetic oligonucleotide"
ccccgtgaaaacgaggcaca

SEQ ID NO: 847 - DNA, 20 bp, Artificial Sequence
  source: /note="Description of Artificial Sequence: Synthetic oligonucleotide"
tccccgtgaaaacgaggcac

SEQ ID NO: 848 - DNA, 20 bp, Artificial Sequence
  source: /note="Description of Artificial Sequence: Synthetic oligonucleotide"
gtccccgtgaaaacgaggca

SEQ ID NO: 849 - DNA, 20 bp, Artificial Sequence
  source: /note="Description of Artificial Sequence: Synthetic oligonucleotide"
ggtccccgtgaaaacgaggc

SEQ ID NO: 850 - DNA, 20 bp, Artificial Sequence
  source: /note="Description of Artificial Sequence: Synthetic oligonucleotide"
aggtccccgtgaaaacgagg

SEQ ID NO: 851 - DNA, 20 bp, Artificial Sequence
  source: /note="Description of Artificial Sequence: Synthetic oligonucleotide"
caggtccccgtgaaaacgag

SEQ ID NO: 852 - DNA, 20 bp, Artificial Sequence
  source: /note="Description of Artificial Sequence: Synthetic oligonucleotide"
gcaggtccccgtgaaaacga

SEQ ID NO: 853 - DNA, 20 bp, Artificial Sequence
  source: /note="Description of Artificial Sequence: Synthetic oligonucleotide"
cgcaggtccccgtgaaaacg

SEQ ID NO: 854 - DNA, 20 bp, Artificial Sequence
  source: /note="Description of Artificial Sequence: Synthetic oligonucleotide"
ccgcaggtccccgtgaaaac

SEQ ID NO: 855 - DNA, 20 bp, Artificial Sequence
  source: /note="Description of Artificial Sequence: Synthetic oligonucleotide"
gccgcaggtccccgtgaaaa

SEQ ID NO: 856 - DNA, 20 bp, Artificial Sequence
  source: /note="Description of Artificial Sequence: Synthetic oligonucleotide"
tgccgcaggtccccgtgaaa

SEQ ID NO: 857 - DNA, 20 bp, Artificial Sequence
  source: /note="Description of Artificial Sequence: Synthetic oligonucleotide"
atgccgcaggtccccgtgaa

SEQ ID NO: 858 - DNA, 20 bp, Artificial Sequence
  source: /note="Description of Artificial Sequence: Synthetic oligonucleotide"
gatgccgcaggtccccgtga

SEQ ID NO: 859 - DNA, 20 bp, Artificial Sequence
  source: /note="Description of Artificial Sequence: Synthetic oligonucleotide"
ggatgccgcaggtccccgtg

SEQ ID NO: 860 - DNA, 20 bp, Artificial Sequence
  source: /note="Description of Artificial Sequence: Synthetic oligonucleotide"
tggatgccgcaggtccccgt

SEQ ID NO: 861 - DNA, 20 bp, Artificial Sequence
  source: /note="Description of Artificial Sequence: Synthetic oligonucleotide"
ctggatgccgcaggtccccg

SEQ ID NO: 862 - DNA, 20 bp, Artificial Sequence
  source: /note="Description of Artificial Sequence: Synthetic oligonucleotide"
gctggatgccgcaggtcccc

SEQ ID NO: 863 - DNA, 20 bp, Artificial Sequence
  source: /note="Description of Artificial Sequence: Synthetic oligonucleotide"
tgctggatgccgcaggtccc

SEQ ID NO: 864 - DNA, 20 bp, Artificial Sequence
  source: /note="Description of Artificial Sequence: Synthetic oligonucleotide"
gtgctggatgccgcaggtcc

SEQ ID NO: 865 - DNA, 20 bp, Artificial Sequence
  source: /note="Description of Artificial Sequence: Synthetic oligonucleotide"
ggtgctggatgccgcaggtc

SEQ ID NO: 866 - DNA, 20 bp, Artificial Sequence
  source: /note="Description of Artificial Sequence: Synthetic oligonucleotide"
aggtgctggatgccgcaggt

SEQ ID NO: 867 - DNA, 20 bp, Artificial Sequence
  source: /note="Description of Artificial Sequence: Synthetic oligonucleotide"
caggtgctggatgccgcagg

SEQ ID NO: 868 - DNA, 20 bp, Artificial Sequence
  source: /note="Description of Artificial Sequence: Synthetic oligonucleotide"
ccaggtgctggatgccgcag

SEQ ID NO: 869 - DNA, 20 bp, Artificial Sequence
  source: /note="Description of Artificial Sequence: Synthetic oligonucleotide"
tccaggtgctggatgccgca

SEQ ID NO: 870 - DNA, 20 bp, Artificial Sequence
  source: /note="Description of Artificial Sequence: Synthetic oligonucleotide"
ctccaggtgctggatgccgc

SEQ ID NO: 871 - DNA, 20 bp, Artificial Sequence
  source: /note="Description of Artificial Sequence: Synthetic oligonucleotide"
gctccaggtgctggatgccg

SEQ ID NO: 872 - DNA, 20 bp, Artificial Sequence
  source: /note="Description of Artificial Sequence: Synthetic oligonucleotide"
cgctccaggtgctggatgcc

SEQ ID NO: 873 - DNA, 20 bp, Artificial Sequence
  source: /note="Description of Artificial Sequence: Synthetic oligonucleotide"
ccgctccaggtgctggatgc

SEQ ID NO: 874 - DNA, 20 bp, Artificial Sequence
  source: /note="Description of Artificial Sequence: Synthetic oligonucleotide"
cccgctccaggtgctggatg

SEQ ID NO: 875 - DNA, 20 bp, Artificial Sequence
  source: /note="Description of Artificial Sequence: Synthetic oligonucleotide"
gcccgctccaggtgctggat

SEQ ID NO: 876 - DNA, 20 bp, Artificial Sequence
  source: /note="Description of Artificial Sequence: Synthetic oligonucleotide"
cgcccgctccaggtgctgga

SEQ ID NO: 877 - DNA, 20 bp, Artificial Sequence
  source: /note="Description of Artificial Sequence: Synthetic oligonucleotide"
ttctcgcccgcccgctccag

SEQ ID NO: 878 - DNA, 20 bp, Artificial Sequence
  source: /note="Description of Artificial Sequence: Synthetic oligonucleotide"
gttctcgcccgcccgctcca

SEQ ID NO: 879 - DNA, 20 bp, Artificial Sequence
  source: /note="Description of Artificial Sequence: Synthetic oligonucleotide"
aggttctcgcccgcccgctc

SEQ ID NO: 880 - DNA, 20 bp, Artificial Sequence
  source: /note="Description of Artificial Sequence: Synthetic oligonucleotide"
caggttctcgcccgcccgct

SEQ ID NO: 881 - DNA, 20 bp, Artificial Sequence
  source: /note="Description of Artificial Sequence: Synthetic oligonucleotide"
acaggttctcgcccgcccgc

SEQ ID NO: 882 - DNA, 20 bp, Artificial Sequence
  source: /note="Description of Artificial Sequence: Synthetic oligonucleotide"
gacaggttctcgcccgcccg

SEQ ID NO: 883 - DNA, 20 bp, Artificial Sequence
  source: /note="Description of Artificial Sequence: Synthetic oligonucleotide"
ggacaggttctcgcccgccc

SEQ ID NO: 884 - DNA, 20 bp, Artificial Sequence
  source: /note="Description of Artificial Sequence: Synthetic oligonucleotide"
gggacaggttctcgcccgcc

SEQ ID NO: 885 - DNA, 20 bp, Artificial Sequence
  source: /note="Description of Artificial Sequence: Synthetic oligonucleotide"
agggacaggttctcgcccgc

SEQ ID NO: 886 - DNA, 20 bp, Artificial Sequence
  source: /note="Description of Artificial Sequence: Synthetic oligonucleotide"
gagggacaggttctcgcccg

SEQ ID NO: 887 - DNA, 20 bp, Artificial Sequence
  source: /note="Description of Artificial Sequence: Synthetic oligonucleotide"
ggagggacaggttctcgccc

SEQ ID NO: 888 - DNA, 20 bp, Artificial Sequence
  source: /note="Description of Artificial Sequence: Synthetic oligonucleotide"
aggagggacaggttctcgcc

SEQ ID NO: 889 - DNA, 20 bp, Artificial Sequence
  source: /note="Description of Artificial Sequence: Synthetic oligonucleotide"
caggagggacaggttctcgc

SEQ ID NO: 890 - DNA, 20 bp, Artificial Sequence
  source: /note="Description of Artificial Sequence: Synthetic oligonucleotide"
tcaggagggacaggttctcg

SEQ ID NO: 891 - DNA, 20 bp, Artificial Sequence
  source: /note="Description of Artificial Sequence: Synthetic oligonucleotide"
gtcaggagggacaggttctc

SEQ ID NO: 892 - DNA, 20 bp, Artificial Sequence
  source: /note="Description of Artificial Sequence: Synthetic oligonucleotide"
aggtcaggagggacaggttc

SEQ ID NO: 893 - DNA, 20 bp, Artificial Sequence
  source: /note="Description of Artificial Sequence: Synthetic oligonucleotide"
gaggtcaggagggacaggtt

SEQ ID NO: 894 - DNA, 20 bp, Artificial Sequence
  source: /note="Description of Artificial Sequence: Synthetic oligonucleotide"
ggaggtcaggagggacaggt

SEQ ID NO: 895 - DNA, 20 bp, Artificial Sequence
  source: /note="Description of Artificial Sequence: Synthetic oligonucleotide"
aggaggtcaggagggacagg

SEQ ID NO: 896 - DNA, 20 bp, Artificial Sequence
  source: /note="Description of Artificial Sequence: Synthetic oligonucleotide"
aaggaggtcaggagggacag

SEQ ID NO: 897 - DNA, 20 bp, Artificial Sequence
  source: /note="Description of Artificial Sequence: Synthetic oligonucleotide"
gaaggaggtcaggagggaca

SEQ ID NO: 898 - DNA, 20 bp, Artificial Sequence
  source: /note="Description of Artificial Sequence: Synthetic oligonucleotide"
agaaggaggtcaggagggac

SEQ ID NO: 899 - DNA, 20 bp, Artificial Sequence
  source: /note="Description of Artificial Sequence: Synthetic oligonucleotide"
tagaaggaggtcaggaggga

SEQ ID NO: 900 - DNA, 20 bp, Artificial Sequence
  source: /note="Description of Artificial Sequence: Synthetic oligonucleotide"
gtagaaggaggtcaggaggg

SEQ ID NO: 901 - DNA, 20 bp, Artificial Sequence
  source: /note="Description of Artificial Sequence: Synthetic oligonucleotide"
agtagaaggaggtcaggagg

SEQ ID NO: 902 - DNA, 20 bp, Artificial Sequence
  source: /note="Description of Artificial Sequence: Synthetic oligonucleotide"
aagtagaaggaggtcaggag

SEQ ID NO: 903 - DNA, 20 bp, Artificial Sequence
  source: /note="Description of Artificial Sequence: Synthetic oligonucleotide"
gaagtagaaggaggtcagga

SEQ ID NO: 904 - DNA, 20 bp, Artificial Sequence
  source: /note="Description of Artificial Sequence: Synthetic oligonucleotide"
agaagtagaaggaggtcagg

SEQ ID NO: 905 - DNA, 20 bp, Artificial Sequence
  source: /note="Description of Artificial Sequence: Synthetic oligonucleotide"
cagaagtagaaggaggtcag

SEQ ID NO: 906 - DNA, 20 bp, Artificial Sequence
  source: /note="Description of Artificial Sequence: Synthetic oligonucleotide"
tgcagaagtagaaggaggtc

SEQ ID NO: 907 - DNA, 20 bp, Artificial Sequence
  source: /note="Description of Artificial Sequence: Synthetic oligonucleotide"
atgcagaagtagaaggaggt

SEQ ID NO: 908 - DNA, 20 bp, Artificial Sequence
  source: /note="Description of Artificial Sequence: Synthetic oligonucleotide"
gatgcagaagtagaaggagg

SEQ ID NO: 909 - DNA, 20 bp, Artificial Sequence
  source: /note="Description of Artificial Sequence: Synthetic oligonucleotide"
cgatgcagaagtagaaggag

SEQ ID NO: 910 - DNA, 20 bp, Artificial Sequence
  source: /note="Description of Artificial Sequence: Synthetic oligonucleotide"
acgatgcagaagtagaagga

SEQ ID NO: 911 - DNA, 20 bp, Artificial Sequence
  source: /note="Description of Artificial Sequence: Synthetic oligonucleotide"
gacgatgcagaagtagaagg

SEQ ID NO: 912 - DNA, 20 bp, Artificial Sequence
  source: /note="Description of Artificial Sequence: Synthetic oligonucleotide"
tgacgatgcagaagtagaag

SEQ ID NO: 913 - DNA, 20 bp, Artificial Sequence
  source: /note="Description of Artificial Sequence: Synthetic oligonucleotide"
gtgacgatgcagaagtagaa

SEQ ID NO: 914 - DNA, 20 bp, Artificial Sequence
  source: /note="Description of Artificial Sequence: Synthetic oligonucleotide"
ggtgacgatgcagaagtaga

SEQ ID NO: 915 - DNA, 20 bp, Artificial Sequence
  source: /note="Description of Artificial Sequence: Synthetic oligonucleotide"
aggtgacgatgcagaagtag

SEQ ID NO: 916 - DNA, 20 bp, Artificial Sequence
  source: /note="Description of Artificial Sequence: Synthetic oligonucleotide"
aaggtgacgatgcagaagta

SEQ ID NO: 917 - DNA, 20 bp, Artificial Sequence
  source: /note="Description of Artificial Sequence: Synthetic oligonucleotide"
gaaggtgacgatgcagaagt

SEQ ID NO: 918 - DNA, 20 bp, Artificial Sequence
  source: /note="Description of Artificial Sequence: Synthetic oligonucleotide"
agaaggtgacgatgcagaag

SEQ ID NO: 919 - DNA, 20 bp, Artificial Sequence
  source: /note="Description of Artificial Sequence: Synthetic oligonucleotide"
gagaaggtgacgatgcagaa

SEQ ID NO: 920 - DNA, 20 bp, Artificial Sequence
  source: /note="Description of Artificial Sequence: Synthetic oligonucleotide"
ggagaaggtgacgatgcaga

SEQ ID NO: 921 - DNA, 20 bp, Artificial Sequence
  source: /note="Description of Artificial Sequence: Synthetic oligonucleotide"
tggagaaggtgacgatgcag

SEQ ID NO: 922 - DNA, 20 bp, Artificial Sequence
  source: /note="Description of Artificial Sequence: Synthetic oligonucleotide"
gtggagaaggtgacgatgca

SEQ ID NO: 923 - DNA, 20 bp, Artificial Sequence
  source: /note="Description of Artificial Sequence: Synthetic oligonucleotide"
ggtggagaaggtgacgatgc

SEQ ID NO: 924 - DNA, 20 bp, Artificial Sequence
  source: /note="Description of Artificial Sequence: Synthetic oligonucleotide"
cggtggagaaggtgacgatg

SEQ ID NO: 925 - DNA, 20 bp, Artificial Sequence
  source: /note="Description of Artificial Sequence: Synthetic oligonucleotide"
cacggtggagaaggtgacga

SEQ ID NO: 926 - DNA, 20 bp, Artificial Sequence
  source: /note="Description of Artificial Sequence: Synthetic oligonucleotide"
ccacggtggagaaggtgacg

SEQ ID NO: 927 - DNA, 20 bp, Artificial Sequence
  source: /note="Description of Artificial Sequence: Synthetic oligonucleotide"
cccacggtggagaaggtgac

SEQ ID NO: 928 - DNA, 20 bp, Artificial Sequence
  source: /note="Description of Artificial Sequence: Synthetic oligonucleotide"
gcccacggtggagaaggtga

SEQ ID NO: 929 - DNA, 20 bp, Artificial Sequence
  source: /note="Description of Artificial Sequence: Synthetic oligonucleotide"
agcccacggtggagaaggtg

SEQ ID NO: 930 - DNA, 20 bp, Artificial Sequence
  source: /note="Description of Artificial Sequence: Synthetic oligonucleotide"
tagcccacggtggagaaggt

SEQ ID NO: 931 - DNA, 20 bp, Artificial Sequence
  source: /note="Description of Artificial Sequence: Synthetic oligonucleotide"
gtagcccacggtggagaagg

SEQ ID NO: 932 - DNA, 20 bp, Artificial Sequence
  source: /note="Description of Artificial Sequence: Synthetic oligonucleotide"
cgtagcccacggtggagaag

SEQ ID NO: 933 - DNA, 20 bp, Artificial Sequence
  source: /note="Description of Artificial Sequence: Synthetic oligonucleotide"
ccgtagcccacggtggagaa

SEQ ID NO: 934 - DNA, 20 bp, Artificial Sequence
  source: /note="Description of Artificial Sequence: Synthetic oligonucleotide"
accgtagcccacggtggaga

SEQ ID NO: 935 - DNA, 20 bp, Artificial Sequence
  source: /note="Description of Artificial Sequence: Synthetic oligonucleotide"
caccgtagcccacggtggag

SEQ ID NO: 936 - DNA, 20 bp, Artificial Sequence
  source: /note="Description of Artificial Sequence: Synthetic oligonucleotide"
tcaccgtagcccacggtgga

SEQ ID NO: 937 - DNA, 20 bp, Artificial Sequence
  source: /note="Description of Artificial Sequence: Synthetic oligonucleotide"
cgtcaccgtagcccacggtg

SEQ ID NO: 938 - DNA, 20 bp, Artificial Sequence
  source: /note="Description of Artificial Sequence: Synthetic oligonucleotide"
acgtcaccgtagcccacggt

SEQ ID NO: 939 - DNA, 20 bp, Artificial Sequence
  source: /note="Description of Artificial Sequence: Synthetic oligonucleotide"
gacgtcaccgtagcccacgg

SEQ ID NO: 940 - DNA, 20 bp, Artificial Sequence
  source: /note="Description of Artificial Sequence: Synthetic oligonucleotide"
tgacgtcaccgtagcccacg

SEQ ID NO: 941 - DNA, 20 bp, Artificial Sequence
  source: /note="Description of Artificial Sequence: Synthetic oligonucleotide"
agatcttgggcgtgacgtca

SEQ ID NO: 942 - DNA, 20 bp, Artificial Sequence
  source: /note="Description of Artificial Sequence: Synthetic oligonucleotide"
cagatcttgggcgtgacgtc

SEQ ID NO: 943 - DNA, 20 bp, Artificial Sequence
  source: /note="Description of Artificial Sequence: Synthetic oligonucleotide"
ccagatcttgggcgtgacgt

SEQ ID NO: 944 - DNA, 20 bp, Artificial Sequence
  source: /note="Description of Artificial Sequence: Synthetic oligonucleotide"
gccagatcttgggcgtgacg

SEQ ID NO: 945 - DNA, 20 bp, Artificial Sequence
  source: /note="Description of Artificial Sequence: Synthetic oligonucleotide"
tggccagatcttgggcgtga

SEQ ID NO: 946 - DNA, 20 bp, Artificial Sequence
  source: /note="Description of Artificial Sequence: Synthetic oligonucleotide"
atggccagatcttgggcgtg

SEQ ID NO: 947 - DNA, 20 bp, Artificial Sequence
  source: /note="Description of Artificial Sequence: Synthetic oligonucleotide"
gatggccagatcttgggcgt

SEQ ID NO: 948 - DNA, 20 bp, Artificial Sequence
  source: /note="Description of Artificial Sequence: Synthetic oligonucleotide"
cgatggccagatcttgggcg

SEQ ID NO: 949 - DNA, 20 bp, Artificial Sequence
  source: /note="Description of Artificial Sequence: Synthetic oligonucleotide"
gcgatggccagatcttgggc

SEQ ID NO: 950 - DNA, 20 bp, Artificial Sequence
  source: /note="Description of Artificial Sequence: Synthetic oligonucleotide"
tgcgatggccagatcttggg

SEQ ID NO: 951 - DNA, 20 bp, Artificial Sequence
  source: /note="Description of Artificial Sequence: Synthetic oligonucleotide"
ctgcgatggccagatcttgg

SEQ ID NO: 952 - DNA, 20 bp, Artificial Sequence
  source: /note="Description of Artificial Sequence: Synthetic oligonucleotide"
gctgcgatggccagatcttg

SEQ ID NO: 953 - DNA, 20 bp, Artificial Sequence
  source: /note="Description of Artificial Sequence: Synthetic oligonucleotide"
agctgcgatggccagatctt

SEQ ID NO: 954 - DNA, 20 bp, Artificial Sequence
  source: /note="Description of Artificial Sequence: Synthetic oligonucleotide"
cagctgcgatggccagatct

SEQ ID NO: 955 - DNA, 20 bp, Artificial Sequence
  source: /note="Description of Artificial Sequence: Synthetic oligonucleotide"
atgatgaccaccagcagctg

SEQ ID NO: 956 - DNA, 20 bp, Artificial Sequence
  source: /note="Description of Artificial Sequence: Synthetic oligonucleotide"
catgatgaccaccagcagct

SEQ ID NO: 957 - DNA, 20 bp, Artificial Sequence
  source: /note="Description of Artificial Sequence: Synthetic oligonucleotide"
tcatgatgaccaccagcagc

SEQ ID NO: 958 - DNA, 20 bp, Artificial Sequence
  source: /note="Description of Artificial Sequence: Synthetic oligonucleotide"
atcatgatgaccaccagcag

SEQ ID NO: 959 - DNA, 20 bp, Artificial Sequence
  source: /note="Description of Artificial Sequence: Synthetic oligonucleotide"
gatcatgatgaccaccagca

SEQ ID NO: 960 - DNA, 20 bp, Artificial Sequence
  source: /note="Description of Artificial Sequence: Synthetic oligonucleotide"
agatcatgatgaccaccagc

SEQ ID NO: 961 - DNA, 20 bp, Artificial Sequence
  source: /note="Description of Artificial Sequence: Synthetic oligonucleotide"
cagatcatgatgaccaccag

SEQ ID NO: 962 - DNA, 20 bp, Artificial Sequence
  source: /note="Description of Artificial Sequence: Synthetic oligonucleotide"
gcagatcatgatgaccacca

SEQ ID NO: 963 - DNA, 20 bp, Artificial Sequence
  source: /note="Description of Artificial Sequence: Synthetic oligonucleotide"
cgcagatcatgatgaccacc

SEQ ID NO: 964 - DNA, 20 bp, Artificial Sequence
  source: /note="Description of Artificial Sequence: Synthetic oligonucleotide"
acgcagatcatgatgaccac

SEQ ID NO: 965 - DNA, 20 bp, Artificial Sequence
  source: /note="Description of Artificial Sequence: Synthetic oligonucleotide"
cacgcagatcatgatgacca

SEQ ID NO: 966 - DNA, 20 bp, Artificial Sequence
  source: /note="Description of Artificial Sequence: Synthetic oligonucleotide"
ccacgcagatcatgatgacc

SEQ ID NO: 967 - DNA, 20 bp, Artificial Sequence
  source: /note="Description of Artificial Sequence: Synthetic oligonucleotide"
gccacgcagatcatgatgac

SEQ ID NO: 968 - DNA, 20 bp, Artificial Sequence
  source: /note="Description of Artificial Sequence: Synthetic oligonucleotide"
ggccacgcagatcatgatga

SEQ ID NO: 969 - DNA, 20 bp, Artificial Sequence
  source: /note="Description of Artificial Sequence: Synthetic oligonucleotide"
gggccacgcagatcatgatg

SEQ ID NO: 970 - DNA, 20 bp, Artificial Sequence
  source: /note="Description of Artificial Sequence: Synthetic oligonucleotide"
agggccacgcagatcatgat

SEQ ID NO: 971 - DNA, 20 bp, Artificial Sequence
  source: /note="Description of Artificial Sequence: Synthetic oligonucleotide"
gagggccacgcagatcatga

SEQ ID NO: 972 - DNA, 20 bp, Artificial Sequence
  source: /note="Description of Artificial Sequence: Synthetic oligonucleotide"
cgagggccacgcagatcatg

SEQ ID NO: 973 - DNA, 20 bp, Artificial Sequence
  source: /note="Description of Artificial Sequence: Synthetic oligonucleotide"
cacgagggccacgcagatca

SEQ ID NO: 974 - DNA, 20 bp, Artificial Sequence
  source: /note="Description of Artificial Sequence: Synthetic oligonucleotide"
ccacgagggccacgcagatc

SEQ ID NO: 975 - DNA, 20 bp, Artificial Sequence
  source: /note="Description of Artificial Sequence: Synthetic oligonucleotide"
accacgagggccacgcagat

SEQ ID NO: 976 - DNA, 20 bp, Artificial Sequence
  source: /note="Description of Artificial Sequence: Synthetic oligonucleotide"
caccacgagggccacgcaga

SEQ ID NO: 977 - DNA, 20 bp, Artificial Sequence
  source: /note="Description of Artificial Sequence: Synthetic oligonucleotide"
gcaccacgagggccacgcag

SEQ ID NO: 978 - DNA, 20 bp, Artificial Sequence
  source: /note="Description of Artificial Sequence: Synthetic oligonucleotide"
agcaccacgagggccacgca

SEQ ID NO: 979 - DNA, 20 bp, Artificial Sequence
  source: /note="Description of Artificial Sequence: Synthetic oligonucleotide"
gagcaccacgagggccacgc

SEQ ID NO: 980 - DNA, 20 bp, Artificial Sequence
  source: /note="Description of Artificial Sequence: Synthetic oligonucleotide"
ggagcaccacgagggccacg

SEQ ID NO: 981 - DNA, 20 bp, Artificial Sequence
  source: /note="Description of Artificial Sequence: Synthetic oligonucleotide"
gggagcaccacgagggccac

SEQ ID NO: 982 - DNA, 20 bp, Artificial Sequence
  source: /note="Description of Artificial Sequence: Synthetic oligonucleotide"
tgggagcaccacgagggcca

SEQ ID NO: 983 - DNA, 20 bp, Artificial Sequence
  source: /note="Description of Artificial Sequence: Synthetic oligonucleotide"
gtgggagcaccacgagggcc

SEQ ID NO: 984 - DNA, 20 bp, Artificial Sequence
  source: /note="Description of Artificial Sequence: Synthetic oligonucleotide"
agtgggagcaccacgagggc

SEQ ID NO: 985 - DNA, 20 bp, Artificial Sequence
  source: /note="Description of Artificial Sequence: Synthetic oligonucleotide"
cagtgggagcaccacgaggg

SEQ ID NO: 986 - DNA, 20 bp, Artificial Sequence
  source: /note="Description of Artificial Sequence: Synthetic oligonucleotide"
gcagtgggagcaccacgagg

SEQ ID NO: 987 - DNA, 20 bp, Artificial Sequence
  source: /note="Description of Artificial Sequence: Synthetic oligonucleotide"
tgcagtgggagcaccacgag

SEQ ID NO: 988 - DNA, 20 bp, Artificial Sequence
  source: /note="Description of Artificial Sequence: Synthetic oligonucleotide"
ctgcagtgggagcaccacga

SEQ ID NO: 989 - DNA, 20 bp, Artificial Sequence
  source: /note="Description of Artificial Sequence: Synthetic oligonucleotide"
actgcagtgggagcaccacg

SEQ ID NO: 990 - DNA, 20 bp, Artificial Sequence
  source: /note="Description of Artificial Sequence: Synthetic oligonucleotide"
aactgcagtgggagcaccac

SEQ ID NO: 991 - DNA, 20 bp, Artificial Sequence
  source: /note="Description of Artificial Sequence: Synthetic oligonucleotide"
gaactgcagtgggagcacca

SEQ ID NO: 992 - DNA, 20 bp, Artificial Sequence
  source: /note="Description of Artificial Sequence: Synthetic oligonucleotide"
cgaactgcagtgggagcacc

SEQ ID NO: 993 - DNA, 20 bp, Artificial Sequence
  source: /note="Description of Artificial Sequence: Synthetic oligonucleotide"
tcgaactgcagtgggagcac

SEQ ID NO: 994 - DNA, 20 bp, Artificial Sequence
  source: /note="Description of Artificial Sequence: Synthetic oligonucleotide"
ctcgaactgcagtgggagca

SEQ ID NO: 995 - DNA, 20 bp, Artificial Sequence
  source: /note="Description of Artificial Sequence: Synthetic oligonucleotide"
cctcgaactgcagtgggagc

SEQ ID NO: 996 - DNA, 20 bp, Artificial Sequence
  source: /note="Description of Artificial Sequence: Synthetic oligonucleotide"
tcctcgaactgcagtgggag

SEQ ID NO: 997 - DNA, 20 bp, Artificial Sequence
  source: /note="Description of Artificial Sequence: Synthetic oligonucleotide"
ctcctcgaactgcagtggga

SEQ ID NO: 998 - DNA, 20 bp, Artificial Sequence
  source: /note="Description of Artificial Sequence: Synthetic oligonucleotide"
gctcctcgaactgcagtggg

SEQ ID NO: 999 - DNA, 20 bp, Artificial Sequence
  source: /note="Description of Artificial Sequence: Synthetic oligonucleotide"
agctcctcgaactgcagtgg

SEQ ID NO: 1000 - DNA, 20 bp, Artificial Sequence
  source: /note="Description of Artificial Sequence: Synthetic oligonucleotide"
gagctcctcgaactgcagtg

SEQ ID NO: 1001 - DNA, 20 bp, Artificial Sequence
  source: /note="Description of Artificial Sequence: Synthetic oligonucleotide"
cgagctcctcgaactgcagt

SEQ ID NO: 1002 - DNA, 20 bp, Artificial Sequence
  source: /note="Description of Artificial Sequence: Synthetic oligonucleotide"
acgagctcctcgaactgcag

SEQ ID NO: 1003 - DNA, 20 bp, Artificial Sequence
  source: /note="Description of Artificial Sequence: Synthetic oligonucleotide"
gacgagctcctcgaactgca

SEQ ID NO: 1004 - DNA, 20 bp, Artificial Sequence
  source: /note="Description of Artificial Sequence: Synthetic oligonucleotide"
agacgagctcctcgaactgc

SEQ ID NO: 1005 - DNA, 20 bp, Artificial Sequence
  source: /note="Description of Artificial Sequence: Synthetic oligonucleotide"
gtagacgagctcctcgaact

SEQ ID NO: 1006 - DNA, 20 bp, Artificial Sequence
  source: /note="Description of Artificial Sequence: Synthetic oligonucleotide"
ggtagacgagctcctcgaac

SEQ ID NO: 1007 - DNA, 20 bp, Artificial Sequence
  source: /note="Description of Artificial Sequence: Synthetic oligonucleotide"
aggtagacgagctcctcgaa

SEQ ID NO: 1008 - DNA, 20 bp, Artificial Sequence
  source: /note="Description of Artificial Sequence: Synthetic oligonucleotide"
gaggtagacgagctcctcga

SEQ ID NO: 1009 - DNA, 20 bp, Artificial Sequence
  source: /note="Description of Artificial Sequence: Synthetic oligonucleotide"
agaggtagacgagctcctcg

SEQ ID NO: 1010 - DNA, 20 bp, Artificial Sequence
  source: /note="Description of Artificial Sequence: Synthetic oligonucleotide"
cagaggtagacgagctcctc

SEQ ID NO: 1011 - DNA, 20 bp, Artificial Sequence
  source: /note="Description of Artificial Sequence: Synthetic oligonucleotide"
ccagaggtagacgagctcct

SEQ ID NO: 1012 - DNA, 20 bp, Artificial Sequence
  source: /note="Description of Artificial Sequence: Synthetic oligonucleotide"
tccagaggtagacgagctcc

SEQ ID NO: 1013 - DNA, 20 bp, Artificial Sequence
  source: /note="Description of Artificial Sequence: Synthetic oligonucleotide"
atccagaggtagacgagctc

SEQ ID NO: 1014 - DNA, 20 bp, Artificial Sequence
  source: /note="Description of Artificial Sequence: Synthetic oligonucleotide"
catccagaggtagacgagct

SEQ ID NO: 1015 - DNA, 20 bp, Artificial Sequence
  source: /note="Description of Artificial Sequence: Synthetic oligonucleotide"
ccatccagaggtagacgagc

SEQ ID NO: 1016 - DNA, 20 bp, Artificial Sequence
  source: /note="Description of Artificial Sequence: Synthetic oligonucleotide"
tccatccagaggtagacgag

SEQ ID NO: 1017 - DNA, 20 bp, Artificial Sequence
  source: /note="Description of Artificial Sequence: Synthetic oligonucleotide"
ctccatccagaggtagacga

SEQ ID NO: 1018 - DNA, 20 bp, Artificial Sequence
  source: /note="Description of Artificial Sequence: Synthetic oligonucleotide"
gctccatccagaggtagacg

SEQ ID NO: 1019 - DNA, 20 bp, Artificial Sequence
  source: /note="Description of Artificial Sequence: Synthetic oligonucleotide"
cgctccatccagaggtagac

SEQ ID NO: 1020 - DNA, 20 bp, Artificial Sequence
  source: /note="Description of Artificial Sequence: Synthetic oligonucleotide"
ccgctccatccagaggtaga

SEQ ID NO: 1021 - DNA, 20 bp, Artificial Sequence
  source: /note="Description of Artificial Sequence: Synthetic oligonucleotide"
gccgctccatccagaggtag

SEQ ID NO: 1022 - DNA, 20 bp, Artificial Sequence
  source: /note="Description of Artificial Sequence: Synthetic oligonucleotide"
tgccgctccatccagaggta

SEQ ID NO: 1023 - DNA, 20 bp, Artificial Sequence
  source: /note="Description of Artificial Sequence: Synthetic oligonucleotide"
ctgccgctccatccagaggt

SEQ ID NO: 1024 - DNA, 20 bp, Artificial Sequence
  source: /note="Description of Artificial Sequence: Synthetic oligonucleotide"
tctgccgctccatccagagg

SEQ ID NO: 1025 - DNA, 20 bp, Artificial Sequence
  source: /note="Description of Artificial Sequence: Synthetic oligonucleotide"
ttctgccgctccatccagag

SEQ ID NO: 1026 - DNA, 20 bp, Artificial Sequence
  source: /note="Description of Artificial Sequence: Synthetic oligonucleotide"
cttctgccgctccatccaga

SEQ ID NO: 1027 - DNA, 20 bp, Artificial Sequence
  source: /note="Description of Artificial Sequence: Synthetic oligonucleotide"
acttctgccgctccatccag

SEQ ID NO: 1028 - DNA, 20 bp, Artificial Sequence
  source: /note="Description of Artificial Sequence: Synthetic oligonucleotide"
gacttctgccgctccatcca

SEQ ID NO: 1029 - DNA, 20 bp, Artificial Sequence
  source: /note="Description of Artificial Sequence: Synthetic oligonucleotide"
tgacttctgccgctccatcc

SEQ ID NO: 1030 - DNA, 20 bp, Artificial Sequence
  source: /note="Description of Artificial Sequence: Synthetic oligonucleotide"
ctgacttctgccgctccatc

SEQ ID NO: 1031 - DNA, 20 bp, Artificial Sequence
  source: /note="Description of Artificial Sequence: Synthetic oligonucleotide"
cctgacttctgccgctccat

SEQ ID NO: 1032 - DNA, 20 bp, Artificial Sequence
  source: /note="Description of Artificial Sequence: Synthetic oligonucleotide"
ccctgacttctgccgctcca

SEQ ID NO: 1033 - DNA, 20 bp, Artificial Sequence
  source: /note="Description of Artificial Sequence: Synthetic oligonucleotide"
cccctgacttctgccgctcc

SEQ ID NO: 1034 - DNA, 20 bp, Artificial Sequence
  source: /note="Description of Artificial Sequence: Synthetic oligonucleotide"
ccccctgacttctgccgctc

SEQ ID NO: 1035 - DNA, 20 bp, Artificial Sequence
  source: /note="Description of Artificial Sequence: Synthetic oligonucleotide"
gccccctgacttctgccgct

SEQ ID NO: 1036 - DNA, 20 bp, Artificial Sequence
  source: /note="Description of Artificial Sequence: Synthetic oligonucleotide"
tgccccctgacttctgccgc

SEQ ID NO: 1037 - DNA, 20 bp, Artificial Sequence
  source: /note="Description of Artificial Sequence: Synthetic oligonucleotide"
ttgccccctgacttctgccg

SEQ ID NO: 1038 - DNA, 20 bp, Artificial Sequence
  source: /note="Description of Artificial Sequence: Synthetic oligonucleotide"
gttgccccctgacttctgcc

SEQ ID NO: 1039 - DNA, 20 bp, Artificial Sequence
  source: /note="Description of Artificial Sequence: Synthetic oligonucleotide"
agttgccccctgacttctgc

SEQ ID NO: 1040 - DNA, 20 bp, Artificial Sequence
  source: /note="Description of Artificial Sequence: Synthetic oligonucleotide"
tagttgccccctgacttctg

SEQ ID NO: 1041 - DNA, 20 bp, Artificial Sequence
  source: /note="Description of Artificial Sequence: Synthetic oligonucleotide"
gtagttgccccctgacttct

SEQ ID NO: 1042 - DNA, 20 bp, Artificial Sequence
  source: /note="Description of Artificial Sequence: Synthetic oligonucleotide"
tgtagttgccccctgacttc

SEQ ID NO: 1043 - DNA, 20 bp, Artificial Sequence
  source: /note="Description of Artificial Sequence: Synthetic oligonucleotide"
ctgtagttgccccctgactt

SEQ ID NO: 1044 - DNA, 20 bp, Artificial Sequence
  source: /note="Description of Artificial Sequence: Synthetic oligonucleotide"
gctgtagttgccccctgact

SEQ ID NO: 1045 - DNA, 20 bp, Artificial Sequence
  source: /note="Description of Artificial Sequence: Synthetic oligonucleotide"
ggctgtagttgccccctgac

SEQ ID NO: 1046 - DNA, 20 bp, Artificial Sequence
  source: /note="Description of Artificial Sequence: Synthetic oligonucleotide"
cggctgtagttgccccctga

SEQ ID NO: 1047 - DNA, 20 bp, Artificial Sequence
  source: /note="Description of Artificial Sequence: Synthetic oligonucleotide"
gcggctgtagttgccccctg

SEQ ID NO: 1048 - DNA, 20 bp, Artificial Sequence
  source: /note="Description of Artificial Sequence: Synthetic oligonucleotide"
ggcggctgtagttgccccct

SEQ ID NO: 1049 - DNA, 20 bp, Artificial Sequence
  source: /note="Description of Artificial Sequence: Synthetic oligonucleotide"
tggcggctgtagttgccccc

SEQ ID NO: 1050 - DNA, 20 bp, Artificial Sequence
  source: /note="Description of Artificial Sequence: Synthetic oligonucleotide"
gtggcggctgtagttgcccc

SEQ ID NO: 1051 - DNA, 20 bp, Artificial Sequence
  source: /note="Description of Artificial Sequence: Synthetic oligonucleotide"
ggtggcggctgtagttgccc

SEQ ID NO: 1052 - DNA, 20 bp, Artificial Sequence
  source: /note="Description of Artificial Sequence: Synthetic oligonucleotide"
cggtggcggctgtagttgcc

SEQ ID NO: 1053 - DNA, 20 bp, Artificial Sequence
  source: /note="Description of Artificial Sequence: Synthetic oligonucleotide"
acggtggcggctgtagttgc

SEQ ID NO: 1054 - DNA, 20 bp, Artificial Sequence
  source: /note="Description of Artificial Sequence: Synthetic oligonucleotide"
cacggtggcggctgtagttg

SEQ ID NO: 1055 - DNA, 20 bp, Artificial Sequence
  source: /note="Description of Artificial Sequence: Synthetic oligonucleotide"
gcacggtggcggctgtagtt

SEQ ID NO: 1056 - DNA, 20 bp, Artificial Sequence
  source: /note="Description of Artificial Sequence: Synthetic oligonucleotide"
cgcacggtggcggctgtagt

SEQ ID NO: 1057 - DNA, 20 bp, Artificial Sequence
  source: /note="Description of Artificial Sequence: Synthetic oligonucleotide"
gcgcacggtggcggctgtag

SEQ ID NO: 1058 - DNA, 20 bp, Artificial Sequence
  source: /note="Description of Artificial Sequence: Synthetic oligonucleotide"
tgcgcacggtggcggctgta

SEQ ID NO: 1059 - DNA, 20 bp, Artificial Sequence
  source: /note="Description of Artificial Sequence: Synthetic oligonucleotide"
ctgcgcacggtggcggctgt

SEQ ID NO: 1060 - DNA, 20 bp, Artificial Sequence
  source: /note="Description of Artificial Sequence: Synthetic oligonucleotide"
tctgcgcacggtggcggctg

SEQ ID NO: 1061 - DNA, 20 bp, Artificial Sequence
  source: /note="Description of Artificial Sequence: Synthetic oligonucleotide"
gtctgcgcacggtggcggct

SEQ ID NO: 1062 - DNA, 20 bp, Artificial Sequence
  source: /note="Description of Artificial Sequence: Synthetic oligonucleotide"
tccgtctgcgcacggtggcg

SEQ ID NO: 1063 - DNA, 20 bp, Artificial Sequence
  source: /note="Description of Artificial Sequence: Synthetic oligonucleotide"
ctccgtctgcgcacggtggc

SEQ ID NO: 1064 - DNA, 20 bp, Artificial Sequence
  source: /note="Description of Artificial Sequence: Synthetic oligonucleotide"
tctccgtctgcgcacggtgg

SEQ ID NO: 1065 - DNA, 20 bp, Artificial Sequence
  source: /note="Description of Artificial Sequence: Synthetic oligonucleotide"
ttctccgtctgcgcacggtg

SEQ ID NO: 1066 - DNA, 20 bp, Artificial Sequence
  source: /note="Description of Artificial Sequence: Synthetic oligonucleotide"
cttctccgtctgcgcacggt

SEQ ID NO: 1067 - DNA, 20 bp, Artificial Sequence
  source: /note="Description of Artificial Sequence: Synthetic oligonucleotide"
gcttctccgtctgcgcacgg

SEQ ID NO: 1068 - DNA, 20 bp, Artificial Sequence
  source: /note="Description of Artificial Sequence: Synthetic oligonucleotide"
tgcttctccgtctgcgcacg

SEQ ID NO: 1069 - DNA, 20 bp, Artificial Sequence
  source: /note="Description of Artificial Sequence: Synthetic oligonucleotide"
gtgcttctccgtctgcgcac

SEQ ID NO: 1070 - DNA, 20 bp, Artificial Sequence
  source: /note="Description of Artificial Sequence: Synthetic oligonucleotide"
cgtgcttctccgtctgcgca

SEQ ID NO: 1071 - DNA, 20 bp, Artificial Sequence
  source: /note="Description of Artificial Sequence: Synthetic oligonucleotide"
acgtgcttctccgtctgcgc

SEQ ID NO: 1072 - DNA, 20 bp, Artificial Sequence
  source: /note="Description of Artificial Sequence: Synthetic oligonucleotide"
cacgtgcttctccgtctgcg

SEQ ID NO: 1073 - DNA, 20 bp, Artificial Sequence
  source: /note="Description of Artificial Sequence: Synthetic oligonucleotide"
ccacgtgcttctccgtctgc

SEQ ID NO: 1074 - DNA, 20 bp, Artificial Sequence
  source: /note="Description of Artificial Sequence: Synthetic oligonucleotide"
accacgtgcttctccgtctg

SEQ ID NO: 1075 - DNA, 20 bp, Artificial Sequence
  source: /note="Description of Artificial Sequence: Synthetic oligonucleotide"
gaccacgtgcttctccgtct

SEQ ID NO: 1076 - DNA, 20 bp, Artificial Sequence
  source: /note="Description of Artificial Sequence: Synthetic oligonucleotide"
ggaccacgtgcttctccgtc

SEQ ID NO: 1077 - DNA, 20 bp, Artificial Sequence
  source: /note="Description of Artificial Sequence: Synthetic oligonucleotide"
aggaccacgtgcttctccgt

SEQ ID NO: 1078 - DNA, 20 bp, Artificial Sequence
  source: /note="Description of Artificial Sequence: Synthetic oligonucleotide"
caggaccacgtgcttctccg

SEQ ID NO: 1079 - DNA, 20 bp, Artificial Sequence
  source: /note="Description of Artificial Sequence: Synthetic oligonucleotide"
acaggaccacgtgcttctcc

SEQ ID NO: 1080 - DNA, 20 bp, Artificial Sequence
  source: /note="Description of Artificial Sequence: Synthetic oligonucleotide"
acacaggaccacgtgcttct

SEQ ID NO: 1081 - DNA, 20 bp, Artificial Sequence
  source: /note="Description of Artificial Sequence: Synthetic oligonucleotide"
cacacaggaccacgtgcttc

SEQ ID NO: 1082 - DNA, 20 bp, Artificial Sequence
  source: /note="Description of Artificial Sequence: Synthetic oligonucleotide"
acacacaggaccacgtgctt

SEQ ID NO: 1083 - DNA, 20 bp, Artificial Sequence
  source: /note="Description of Artificial Sequence: Synthetic oligonucleotide"
gacacacaggaccacgtgct

SEQ ID NO: 1084 - DNA, 20 bp, Artificial Sequence
  source: /note="Description of Artificial Sequence: Synthetic oligonucleotide"
tgacacacaggaccacgtgc

SEQ ID NO: 1085 - DNA, 20 bp, Artificial Sequence
  source: /note="Description of Artificial Sequence: Synthetic oligonucleotide"
ctgacacacaggaccacgtg

SEQ ID NO: 1086 - DNA, 20 bp, Artificial Sequence
  source: /note="Description of Artificial Sequence: Synthetic oligonucleotide"
gctgacacacaggaccacgt

SEQ ID NO: 1087 - DNA, 20 bp, Artificial Sequence
  source: /note="Description of Artificial Sequence: Synthetic oligonucleotide"
agctgacacacaggaccacg

SEQ ID NO: 1088 - DNA, 20 bp, Artificial Sequence
  source: /note="Description of Artificial Sequence: Synthetic oligonucleotide"
gagctgacacacaggaccac

SEQ ID NO: 1089 - DNA, 20 bp, Artificial Sequence
  source: /note="Description of Artificial Sequence: Synthetic oligonucleotide"
ggagctgacacacaggacca

SEQ ID NO: 1090 - DNA, 20 bp, Artificial Sequence
  source: /note="Description of Artificial Sequence: Synthetic oligonucleotide"
gggagctgacacacaggacc

SEQ ID NO: 1091 - DNA, 20 bp, Artificial Sequence
  source: /note="Description of Artificial Sequence: Synthetic oligonucleotide"
agggagctgacacacaggac

SEQ ID NO: 1092 - DNA, 20 bp, Artificial Sequence
  source: /note="Description of Artificial Sequence: Synthetic oligonucleotide"
gagggagctgacacacagga

SEQ ID NO: 1093 - DNA, 20 bp, Artificial Sequence
  source: /note="Description of Artificial Sequence: Synthetic oligonucleotide"
tgagggagctgacacacagg

SEQ ID NO: 1094 - DNA, 20 bp, Artificial Sequence
  source: /note="Description of Artificial Sequence: Synthetic oligonucleotide"
ttgagggagctgacacacag

SEQ ID NO: 1095 - DNA, 20 bp, Artificial Sequence
  source: /note="Description of Artificial Sequence: Synthetic oligonucleotide"
cttgagggagctgacacaca

SEQ ID NO: 1096 - DNA, 20 bp, Artificial Sequence
  source: /note="Description of Artificial Sequence: Synthetic oligonucleotide"
tcttgagggagctgacacac

SEQ ID NO: 1097 - DNA, 20 bp, Artificial Sequence
  source: /note="Description of Artificial Sequence: Synthetic oligonucleotide"
atcttgagggagctgacaca

SEQ ID NO: 1098 - DNA, 20 bp, Artificial Sequence
  source: /note="Description of Artificial Sequence: Synthetic oligonucleotide"
gatcttgagggagctgacac

SEQ ID NO: 1099 - DNA, 20 bp, Artificial Sequence
  source: /note="Description of Artificial Sequence: Synthetic oligonucleotide"
cgatcttgagggagctgaca

SEQ ID NO: 1100 - DNA, 20 bp, Artificial Sequence
  source: /note="Description of Artificial Sequence: Synthetic oligonucleotide"
tcgatcttgagggagctgac

SEQ ID NO: 1101 - DNA, 20 bp, Artificial Sequence
  source: /note="Description of Artificial Sequence: Synthetic oligonucleotide"
ggtcgatcttgagggagctg

SEQ ID NO: 1102 - DNA, 20 bp, Artificial Sequence
  source: /note="Description of Artificial Sequence: Synthetic oligonucleotide"
aggtcgatcttgagggagct

SEQ ID NO: 1103 - DNA, 20 bp, Artificial Sequence
  source: /note="Description of Artificial Sequence: Synthetic oligonucleotide"
aaggtcgatcttgagggagc

SEQ ID NO: 1104 - DNA, 20 bp, Artificial Sequence
  source: /note="Description of Artificial Sequence: Synthetic oligonucleotide"
gaaggtcgatcttgagggag

SEQ ID NO: 1105 - DNA, 20 bp, Artificial Sequence
  source: /note="Description of Artificial Sequence: Synthetic oligonucleotide"
agaaggtcgatcttgaggga

SEQ ID NO: 1106 - DNA, 20 bp, Artificial Sequence
  source: /note="Description of Artificial Sequence: Synthetic oligonucleotide"
gagaaggtcgatcttgaggg

SEQ ID NO: 1107 - DNA, 20 bp, Artificial Sequence
  source: /note="Description of Artificial Sequence: Synthetic oligonucleotide"
tgagaaggtcgatcttgagg

SEQ ID NO: 1108 - DNA, 20 bp, Artificial Sequence
  source: /note="Description of Artificial Sequence: Synthetic oligonucleotide"
atgagaaggtcgatcttgag

SEQ ID NO: 1109 - DNA, 20 bp, Artificial Sequence
  source: /note="Description of Artificial Sequence: Synthetic oligonucleotide"
catgagaaggtcgatcttga

SEQ ID NO: 1110 - DNA, 20 bp, Artificial Sequence
  source: /note="Description of Artificial Sequence: Synthetic oligonucleotide"
ccatgagaaggtcgatcttg

SEQ ID NO: 1111 - DNA, 20 bp, Artificial Sequence
  source: /note="Description of Artificial Sequence: Synthetic oligonucleotide"
tccatgagaaggtcgatctt

SEQ ID NO: 1112 - DNA, 20 bp, Artificial Sequence
  source: /note="Description of Artificial Sequence: Synthetic oligonucleotide"
gtccatgagaaggtcgatct

SEQ ID NO: 1113 - DNA, 20 bp, Artificial Sequence
  source: /note="Description of Artificial Sequence: Synthetic oligonucleotide"
agtccatgagaaggtcgatc

SEQ ID NO: 1114 - DNA, 20 bp, Artificial Sequence
  source: /note="Description of Artificial Sequence: Synthetic oligonucleotide"
aagtccatgagaaggtcgat

SEQ ID NO: 1115 - DNA, 20 bp, Artificial Sequence
  source: /note="Description of Artificial Sequence: Synthetic oligonucleotide"
gaagtccatgagaaggtcga

SEQ ID NO: 1116 - DNA, 20 bp, Artificial Sequence
  source: /note="Description of Artificial Sequence: Synthetic oligonucleotide"
ggaagtccatgagaaggtcg

SEQ ID NO: 1117 - DNA, 20 bp, Artificial Sequence
  source: /note="Description of Artificial Sequence: Synthetic oligonucleotide"
aggaagtccatgagaaggtc

SEQ ID NO: 1118 - DNA, 20 bp, Artificial Sequence
  source: /note="Description of Artificial Sequence: Synthetic oligonucleotide"
caggaagtccatgagaaggt

SEQ ID NO: 1119 - DNA, 20 bp, Artificial Sequence
  source: /note="Description of Artificial Sequence: Synthetic oligonucleotide"
tcaggaagtccatgagaagg

SEQ ID NO: 1120 - DNA, 20 bp, Artificial Sequence
  source: /note="Description of Artificial Sequence: Synthetic oligonucleotide"
ttcaggaagtccatgagaag

SEQ ID NO: 1121 - DNA, 20 bp, Artificial Sequence
  source: /note="Description of Artificial Sequence: Synthetic oligonucleotide"
gttcaggaagtccatgagaa

SEQ ID NO: 1122 - DNA, 20 bp, Artificial Sequence
  source: /note="Description of Artificial Sequence: Synthetic oligonucleotide"
cgttcaggaagtccatgaga

SEQ ID NO: 1123 - DNA, 20 bp, Artificial Sequence
  source: /note="Description of Artificial Sequence: Synthetic oligonucleotide"
tcgttcaggaagtccatgag

SEQ ID NO: 1124 - DNA, 20 bp, Artificial Sequence
  source: /note="Description of Artificial Sequence: Synthetic oligonucleotide"
ctcgttcaggaagtccatga

SEQ ID NO: 1125 - DNA, 20 bp, Artificial Sequence
  source: /note="Description of Artificial Sequence: Synthetic oligonucleotide"
aactcgttcaggaagtccat

SEQ ID NO: 1126 - DNA, 20 bp, Artificial Sequence
  source: /note="Description of Artificial Sequence: Synthetic oligonucleotide"
gaactcgttcaggaagtcca

SEQ ID NO: 1127 - DNA, 20 bp, Artificial Sequence
  source: /note="Description of Artificial Sequence: Synthetic oligonucleotide"
agaactcgttcaggaagtcc

SEQ ID NO: 1128 - DNA, 20 bp, Artificial Sequence
  source: /note="Description of Artificial Sequence: Synthetic oligonucleotide"
tagaactcgttcaggaagtc

SEQ ID NO: 1129 - DNA, 20 bp, Artificial Sequence
  source: /note="Description of Artificial Sequence: Synthetic oligonucleotide"
gtagaactcgttcaggaagt

SEQ ID NO: 1130 - DNA, 20 bp, Artificial Sequence
  source: /note="Description of Artificial Sequence: Synthetic oligonucleotide"
cgtagaactcgttcaggaag

SEQ ID NO: 1131 - DNA, 20 bp, Artificial Sequence
  source: /note="Description of Artificial Sequence: Synthetic oligonucleotide"
gcgtagaactcgttcaggaa

SEQ ID NO: 1132 - DNA, 20 bp, Artificial Sequence
  source: /note="Description of Artificial Sequence: Synthetic oligonucleotide"
ggcgtagaactcgttcagga

SEQ ID NO: 1133 - DNA, 20 bp, Artificial Sequence
  source: /note="Description of Artificial Sequence: Synthetic oligonucleotide"
gggcgtagaactcgttcagg

SEQ ID NO: 1134 - DNA, 20 bp, Artificial Sequence
  source: /note="Description of Artificial Sequence: Synthetic oligonucleotide"
tgggcgtagaactcgttcag

SEQ ID NO: 1135 - DNA, 20 bp, Artificial Sequence
  source: /note="Description of Artificial Sequence: Synthetic oligonucleotide"
gtgggcgtagaactcgttca

SEQ ID NO: 1136 - DNA, 20 bp, Artificial Sequence
  source: /note="Description of Artificial Sequence: Synthetic oligonucleotide"
ggtgggcgtagaactcgttc

SEQ ID NO: 1137 - DNA, 20 bp, Artificial Sequence
  source: /note="Description of Artificial Sequence: Synthetic oligonucleotide"
gggtgggcgtagaactcgtt

SEQ ID NO: 1138 - DNA, 20 bp, Artificial Sequence
  source: /note="Description of Artificial Sequence: Synthetic oligonucleotide"
gtaatagtcctggagccggg

SEQ ID NO: 1139 - DNA, 20 bp, Artificial Sequence
  source: /note="Description of Artificial Sequence: Synthetic oligonucleotide"
cgtaatagtcctggagccgg

SEQ ID NO: 1140 - DNA, 20 bp, Artificial Sequence
  source: /note="Description of Artificial Sequence: Synthetic oligonucleotide"
acgtaatagtcctggagccg

SEQ ID NO: 1141 - DNA, 20 bp, Artificial Sequence
  source: /note="Description of Artificial Sequence: Synthetic oligonucleotide"
cacgtaatagtcctggagcc

SEQ ID NO: 1142 - DNA, 20 bp, Artificial Sequence
  source: /note="Description of Artificial Sequence: Synthetic oligonucleotide"
ccacgtaatagtcctggagc

SEQ ID NO: 1143 - DNA, 20 bp, Artificial Sequence
  source: /note="Description of Artificial Sequence: Synthetic oligonucleotide"
accacgtaatagtcctggag

SEQ ID NO: 1144 - DNA, 20 bp, Artificial Sequence
  source: /note="Description of Artificial Sequence: Synthetic oligonucleotide"
gaccacgtaatagtcctgga

SEQ ID NO: 1145 - DNA, 20 bp, Artificial Sequence
  source: /note="Description of Artificial Sequence: Synthetic oligonucleotide"
atgaccacgtaatagtcctg

SEQ ID NO: 1146 - DNA, 20 bp, Artificial Sequence
  source: /note="Description of Artificial Sequence: Synthetic oligonucleotide"
gatgaccacgtaatagtcct

SEQ ID NO: 1147 - DNA, 20 bp, Artificial Sequence
  source: /note="Description of Artificial Sequence: Synthetic oligonucleotide"
ggatgaccacgtaatagtcc

SEQ ID NO: 1148 - DNA, 20 bp, Artificial Sequence
  source: /note="Description of Artificial Sequence: Synthetic oligonucleotide"
aggatgaccacgtaatagtc

SEQ ID NO: 1149 - DNA, 20 bp, Artificial Sequence
  source: /note="Description of Artificial Sequence: Synthetic oligonucleotide"
caggatgaccacgtaatagt

SEQ ID NO: 1150 - DNA, 20 bp, Artificial Sequence
  source: /note="Description of Artificial Sequence: Synthetic oligonucleotide"
acaggatgaccacgtaatag

SEQ ID NO: 1151 - DNA, 20 bp, Artificial Sequence
  source: /note="Description of Artificial Sequence: Synthetic oligonucleotide"
cacaggatgaccacgtaata

SEQ ID NO: 1152 - DNA, 20 bp, Artificial Sequence
  source: /note="Description of Artificial Sequence: Synthetic oligonucleotide"
gcacaggatgaccacgtaat

SEQ ID NO: 1153 - DNA, 20 bp, Artificial Sequence
  source: /note="Description of Artificial Sequence: Synthetic oligonucleotide"
ggcacaggatgaccacgtaa

SEQ ID NO: 1154 - DNA, 20 bp, Artificial Sequence
  source: /note="Description of Artificial Sequence: Synthetic oligonucleotide"
gggcacaggatgaccacgta

SEQ ID NO: 1155 - DNA, 20 bp, Artificial Sequence
  source: /note="Description of Artificial Sequence: Synthetic oligonucleotide"
tggacatccatctccgtggg

SEQ ID NO: 1156 - DNA, 20 bp, Artificial Sequence
  source: /note="Description of Artificial Sequence: Synthetic oligonucleotide"
ctggacatccatctccgtgg

SEQ ID NO: 1157 - DNA, 20 bp, Artificial Sequence
  source: /note="Description of Artificial Sequence: Synthetic oligonucleotide"
cctggacatccatctccgtg

SEQ ID NO: 1158 - DNA, 20 bp, Artificial Sequence
  source: /note="Description of Artificial Sequence: Synthetic oligonucleotide"
acctggacatccatctccgt

SEQ ID NO: 1159 - DNA, 20 bp, Artificial Sequence
  source: /note="Description of Artificial Sequence: Synthetic oligonucleotide"
cacctggacatccatctccg

SEQ ID NO: 1160 - DNA, 20 bp, Artificial Sequence
  source: /note="Description of Artificial Sequence: Synthetic oligonucleotide"
gcacctggacatccatctcc

SEQ ID NO: 1161 - DNA, 20 bp, Artificial Sequence
  source: /note="Description of Artificial Sequence: Synthetic oligonucleotide"
cgcacctggacatccatctc

SEQ ID NO: 1162 - DNA, 20 bp, Artificial Sequence
  source: /note="Description of Artificial Sequence: Synthetic oligonucleotide"
gcgcacctggacatccatct

SEQ ID NO: 1163 - DNA, 20 bp, Artificial Sequence
  source: /note="Description of Artificial Sequence: Synthetic oligonucleotide"
tgcgcacctggacatccatc

SEQ ID NO: 1164 - DNA, 20 bp, Artificial Sequence
  source: /note="Description of Artificial Sequence: Synthetic oligonucleotide"
ctgcgcacctggacatccat

SEQ ID NO: 1165 - DNA, 20 bp, Artificial Sequence
  source: /note="Description of Artificial Sequence: Synthetic oligonucleotide"
tctgcgcacctggacatcca

SEQ ID NO: 1166 - DNA, 20 bp, Artificial Sequence
  source: /note="Description of Artificial Sequence: Synthetic oligonucleotide"
ctctgcgcacctggacatcc

SEQ ID NO: 1167 - DNA, 20 bp, Artificial Sequence
  source: /note="Description of Artificial Sequence: Synthetic oligonucleotide"
actctgcgcacctggacatc

SEQ ID NO: 1168 - DNA, 20 bp, Artificial Sequence
  source: /note="Description of Artificial Sequence: Synthetic oligonucleotide"
gactctgcgcacctggacat

SEQ ID NO: 1169 - DNA, 20 bp, Artificial Sequence
  source: /note="Description of Artificial Sequence: Synthetic oligonucleotide"
ggactctgcgcacctggaca

SEQ ID NO: 1170 - DNA, 20 bp, Artificial Sequence
  source: /note="Description of Artificial Sequence: Synthetic oligonucleotide"
aggactctgcgcacctggac

SEQ ID NO: 1171 - DNA, 20 bp, Artificial Sequence
  source: /note="Description of Artificial Sequence: Synthetic oligonucleotide"
caggactctgcgcacctgga

SEQ ID NO: 1172 - DNA, 20 bp, Artificial Sequence
  source: /note="Description of Artificial Sequence: Synthetic oligonucleotide"
gcaggactctgcgcacctgg

SEQ ID NO: 1173 - DNA, 20 bp, Artificial Sequence
  source: /note="Description of Artificial Sequence: Synthetic oligonucleotide"
tgcaggactctgcgcacctg

SEQ ID NO: 1174 - DNA, 20 bp, Artificial Sequence
  source: /note="Description of Artificial Sequence: Synthetic oligonucleotide"
ctgcaggactctgcgcacct

SEQ ID NO: 1175 - DNA, 20 bp, Artificial Sequence
  source: /note="Description of Artificial Sequence: Synthetic oligonucleotide"
tctgcaggactctgcgcacc

SEQ ID NO: 1176 - DNA, 20 bp, Artificial Sequence
  source: /note="Description of Artificial Sequence: Synthetic oligonucleotide"
atctgcaggactctgcgcac

SEQ ID NO: 1177 - DNA, 20 bp, Artificial Sequence
  source: /note="Description of Artificial Sequence: Synthetic oligonucleotide"
gatctgcaggactctgcgca

SEQ ID NO: 1178 - DNA, 20 bp, Artificial Sequence
  source: /note="Description of Artificial Sequence: Synthetic oligonucleotide"
ggatctgcaggactctgcgc

SEQ ID NO: 1179 - DNA, 20 bp, Artificial Sequence
  source: /note="Description of Artificial Sequence: Synthetic oligonucleotide"
gggatctgcaggactctgcg

SEQ ID NO: 1180 - DNA, 20 bp, Artificial Sequence
  source: /note="Description of Artificial Sequence: Synthetic oligonucleotide"
gagggatctgcaggactctg

SEQ ID NO: 1181 - DNA, 20 bp, Artificial Sequence
  source: /note="Description of Artificial Sequence: Synthetic oligonucleotide"
agagggatctgcaggactct

SEQ ID NO: 1182 - DNA, 20 bp, Artificial Sequence
  source: /note="Description of Artificial Sequence: Synthetic oligonucleotide"
cagagggatctgcaggactc

SEQ ID NO: 1183 - DNA, 20 bp, Artificial Sequence
  source: /note="Description of Artificial Sequence: Synthetic oligonucleotide"
acagagggatctgcaggact

SEQ ID NO: 1184 - DNA, 20 bp, Artificial Sequence
  source: /note="Description of Artificial Sequence: Synthetic oligonucleotide"
cacagagggatctgcaggac

SEQ ID NO: 1185 - DNA, 20 bp, Artificial Sequence
  source: /note="Description of Artificial Sequence: Synthetic oligonucleotide"
ccacagagggatctgcagga

SEQ ID NO: 1186 - DNA, 20 bp, Artificial Sequence
  source: /note="Description of Artificial Sequence: Synthetic oligonucleotide"
accacagagggatctgcagg

SEQ ID NO: 1187 - DNA, 20 bp, Artificial Sequence
  source: /note="Description of Artificial Sequence: Synthetic oligonucleotide"
gaccacagagggatctgcag

SEQ ID NO: 1188 - DNA, 20 bp, Artificial Sequence
  source: /note="Description of Artificial Sequence: Synthetic oligonucleotide"
ggaccacagagggatctgca

SEQ ID NO: 1189 - DNA, 20 bp, Artificial Sequence
  source: /note="Description of Artificial Sequence: Synthetic oligonucleotide"
gggaccacagagggatctgc

SEQ ID NO: 1190 - DNA, 20 bp, Artificial Sequence
  source: /note="Description of Artificial Sequence: Synthetic oligonucleotide"
tgggaccacagagggatctg

SEQ ID NO: 1191 - DNA, 20 bp, Artificial Sequence
  source: /note="Description of Artificial Sequence: Synthetic oligonucleotide"
ctgggaccacagagggatct

SEQ ID NO: 1192 - DNA, 20 bp, Artificial Sequence
  source: /note="Description of Artificial Sequence: Synthetic oligonucleotide"
gctgggaccacagagggatc

SEQ ID NO: 1193 - DNA, 20 bp, Artificial Sequence
  source: /note="Description of Artificial Sequence: Synthetic oligonucleotide"
cgctgggaccacagagggat

SEQ ID NO: 1194 - DNA, 20 bp, Artificial Sequence
  source: /note="Description of Artificial Sequence: Synthetic oligonucleotide"
ccgctgggaccacagaggga

SEQ ID NO: 1195 - DNA, 20 bp, Artificial Sequence
  source: /note="Description of Artificial Sequence: Synthetic oligonucleotide"
cccgctgggaccacagaggg

SEQ ID NO: 1196 - DNA, 20 bp, Artificial Sequence
  source: /note="Description of Artificial Sequence: Synthetic oligonucleotide"
acccgctgggaccacagagg

SEQ ID NO: 1197 - DNA, 20 bp, Artificial Sequence
  source: /note="Description of Artificial Sequence: Synthetic oligonucleotide"
gacccgctgggaccacagag

SEQ ID NO: 1198 - DNA, 20 bp, Artificial Sequence
  source: /note="Description of Artificial Sequence: Synthetic oligonucleotide"
tgacccgctgggaccacaga

SEQ ID NO: 1199 - DNA, 20 bp, Artificial Sequence
  source: /note="Description of Artificial Sequence: Synthetic oligonucleotide"
atgacccgctgggaccacag

SEQ ID NO: 1200 - DNA, 20 bp, Artificial Sequence
  source: /note="Description of Artificial Sequence: Synthetic oligonucleotide"
gatgacccgctgggaccaca

SEQ ID NO: 1201 - DNA, 20 bp, Artificial Sequence
  source: /note="Description of Artificial Sequence: Synthetic oligonucleotide"
agatgacccgctgggaccac

SEQ ID NO: 1202 - DNA, 20 bp, Artificial Sequence
  source: /note="Description of Artificial Sequence: Synthetic oligonucleotide"
gtagatgacccgctgggacc

SEQ ID NO: 1203 - DNA, 20 bp, Artificial Sequence
  source: /note="Description of Artificial Sequence: Synthetic oligonucleotide"
ggtagatgacccgctgggac

SEQ ID NO: 1204 - DNA, 20 bp, Artificial Sequence
  source: /note="Description of Artificial Sequence: Synthetic oligonucleotide"
aggtagatgacccgctggga

SEQ ID NO: 1205 - DNA, 20 bp, Artificial Sequence
  source: /note="Description of Artificial Sequence: Synthetic oligonucleotide"
gaggtagatgacccgctggg

SEQ ID NO: 1206 - DNA, 20 bp, Artificial Sequence
  source: /note="Description of Artificial Sequence: Synthetic oligonucleotide"
ggaggtagatgacccgctgg

SEQ ID NO: 1207 - DNA, 20 bp, Artificial Sequence
  source: /note="Description of Artificial Sequence: Synthetic oligonucleotide"
tggaggtagatgacccgctg

SEQ ID NO: 1208 - DNA, 20 bp, Artificial Sequence
  source: /note="Description of Artificial Sequence: Synthetic oligonucleotide"
ctggaggtagatgacccgct

SEQ ID NO: 1209 - DNA, 20 bp, Artificial Sequence
  source: /note="Description of Artificial Sequence: Synthetic oligonucleotide"
cctggaggtagatgacccgc

SEQ ID NO: 1210 - DNA, 20 bp, Artificial Sequence
  source: /note="Description of Artificial Sequence: Synthetic oligonucleotide"
ccctggaggtagatgacccg

SEQ ID NO: 1211 - DNA, 20 bp, Artificial Sequence
  source: /note="Description of Artificial Sequence: Synthetic oligonucleotide"
gccctggaggtagatgaccc

SEQ ID NO: 1212 - DNA, 20 bp, Artificial Sequence
  source: /note="Description of Artificial Sequence: Synthetic oligonucleotide"
agccctggaggtagatgacc

SEQ ID NO: 1213 - DNA, 20 bp, Artificial Sequence
  source: /note="Description of Artificial Sequence: Synthetic oligonucleotide"
gagccctggaggtagatgac

SEQ ID NO: 1214 - DNA, 20 bp, Artificial Sequence
  source: /note="Description of Artificial Sequence: Synthetic oligonucleotide"
agagccctggaggtagatga

SEQ ID NO: 1215 - DNA, 20 bp, Artificial Sequence
  source: /note="Description of Artificial Sequence: Synthetic oligonucleotide"
cagagccctggaggtagatg

SEQ ID NO: 1216 - DNA, 20 bp, Artificial Sequence
  source: /note="Description of Artificial Sequence: Synthetic oligonucleotide"
gcagagccctggaggtagat

SEQ ID NO: 1217 - DNA, 20 bp, Artificial Sequence
  source: /note="Description of Artificial Sequence: Synthetic oligonucleotide"
tgcagagccctggaggtaga

SEQ ID NO: 1218 - DNA, 20 bp, Artificial Sequence
  source: /note="Description of Artificial Sequence: Synthetic oligonucleotide"
gtgcagagccctggaggtag

SEQ ID NO: 1219 - DNA, 20 bp, Artificial Sequence
  source: /note="Description of Artificial Sequence: Synthetic oligonucleotide"
agtgcagagccctggaggta

SEQ ID NO: 1220 - DNA, 20 bp, Artificial Sequence
  source: /note="Description of Artificial Sequence: Synthetic oligonucleotide"
gagtgcagagccctggaggt

SEQ ID NO: 1221 - DNA, 20 bp, Artificial Sequence
  source: /note="Description of Artificial Sequence: Synthetic oligonucleotide"
tgagtgcagagccctggagg

SEQ ID NO: 1222 - DNA, 20 bp, Artificial Sequence
  source: /note="Description of Artificial Sequence: Synthetic oligonucleotide"
ttgagtgcagagccctggag

SEQ ID NO: 1223 - DNA, 20 bp, Artificial Sequence
  source: /note="Description of Artificial Sequence: Synthetic oligonucleotide"
tttgagtgcagagccctgga

SEQ ID NO: 1224 - DNA, 20 bp, Artificial Sequence
  source: /note="Description of Artificial Sequence: Synthetic oligonucleotide"
ctttgagtgcagagccctgg

SEQ ID NO: 1225 - DNA, 20 bp, Artificial Sequence
  source: /note="Description of Artificial Sequence: Synthetic oligonucleotide"
tctttgagtgcagagccctg

SEQ ID NO: 1226 - DNA, 20 bp, Artificial Sequence
  source: /note="Description of Artificial Sequence: Synthetic oligonucleotide"
gtctttgagtgcagagccct

SEQ ID NO: 1227 - DNA, 20 bp, Artificial Sequence
  source: /note="Description of Artificial Sequence: Synthetic oligonucleotide"
ggtctttgagtgcagagccc

SEQ ID NO: 1228 - DNA, 20 bp, Artificial Sequence
  source: /note="Description of Artificial Sequence: Synthetic oligonucleotide"
tggtctttgagtgcagagcc

SEQ ID NO: 1229 - DNA, 20 bp, Artificial Sequence
  source: /note="Description of Artificial Sequence: Synthetic oligonucleotide"
ctggtctttgagtgcagagc

SEQ ID NO: 1230 - DNA, 20 bp, Artificial Sequence
  source: /note="Description of Artificial Sequence: Synthetic oligonucleotide"
cctggtctttgagtgcagag

SEQ ID NO: 1231 - DNA, 20 bp, Artificial Sequence
  source: /note="Description of Artificial Sequence: Synthetic oligonucleotide"
tcctggtctttgagtgcaga

SEQ ID NO: 1232 - DNA, 20 bp, Artificial Sequence
  source: /note="Description of Artificial Sequence: Synthetic oligonucleotide"
gtcctggtctttgagtgcag

SEQ ID NO: 1233 - DNA, 20 bp, Artificial Sequence
  source: /note="Description of Artificial Sequence: Synthetic oligonucleotide"
ggtcctggtctttgagtgca

SEQ ID NO: 1234 - DNA, 20 bp, Artificial Sequence
  source: /note="Description of Artificial Sequence: Synthetic oligonucleotide"
aggtcctggtctttgagtgc

SEQ ID NO: 1235 - DNA, 20 bp, Artificial Sequence
  source: /note="Description of Artificial Sequence: Synthetic oligonucleotide"
gaggtcctggtctttgagtg

SEQ ID NO: 1236 - DNA, 20 bp, Artificial Sequence
  source: /note="Description of Artificial Sequence: Synthetic oligonucleotide"
tgaggtcctggtctttgagt

SEQ ID NO: 1237 - DNA, 20 bp, Artificial Sequence
  source: /note="Description of Artificial Sequence: Synthetic oligonucleotide"
atgaggtcctggtctttgag

SEQ ID NO: 1238 - DNA, 20 bp, Artificial Sequence
  source: /note="Description of Artificial Sequence: Synthetic oligonucleotide"
catgaggtcctggtctttga

SEQ ID NO: 1239 - DNA, 20 bp, Artificial Sequence
  source: /note="Description of Artificial Sequence: Synthetic oligonucleotide"
gcatgaggtcctggtctttg

SEQ ID NO: 1240 - DNA, 20 bp, Artificial Sequence
  source: /note="Description of Artificial Sequence: Synthetic oligonucleotide"
cgcatgaggtcctggtcttt

SEQ ID NO: 1241 - DNA, 20 bp, Artificial Sequence
  source: /note="Description of Artificial Sequence: Synthetic oligonucleotide"
tcgcatgaggtcctggtctt

SEQ ID NO: 1242 - DNA, 20 bp, Artificial Sequence
  source: /note="Description of Artificial Sequence: Synthetic oligonucleotide"
ctcgcatgaggtcctggtct

SEQ ID NO: 1243 - DNA, 20 bp, Artificial Sequence
  source: /note="Description of Artificial Sequence: Synthetic oligonucleotide"
gctcgcatgaggtcctggtc

SEQ ID NO: 1244 - DNA, 20 bp, Artificial Sequence
  source: /note="Description of Artificial Sequence: Synthetic oligonucleotide"
ggctcgcatgaggtcctggt

SEQ ID NO: 1245 - DNA, 20 bp, Artificial Sequence
  source: /note="Description of Artificial Sequence: Synthetic oligonucleotide"
tggctcgcatgaggtcctgg

SEQ ID NO: 1246 - DNA, 20 bp, Artificial Sequence
  source: /note="Description of Artificial Sequence: Synthetic oligonucleotide"
ttggctcgcatgaggtcctg

SEQ ID NO: 1247 - DNA, 20 bp, Artificial Sequence
  source: /note="Description of Artificial Sequence: Synthetic oligonucleotide"
cttggctcgcatgaggtcct

SEQ ID NO: 1248 - DNA, 20 bp, Artificial Sequence
  source: /note="Description of Artificial Sequence: Synthetic oligonucleotide"
tcttggctcgcatgaggtcc

SEQ ID NO: 1249 - DNA, 20 bp, Artificial Sequence
  source: /note="Description of Artificial Sequence: Synthetic oligonucleotide"
atcttggctcgcatgaggtc

SEQ ID NO: 1250 - DNA, 20 bp, Artificial Sequence
  source: /note="Description of Artificial Sequence: Synthetic oligonucleotide"
catcttggctcgcatgaggt

SEQ ID NO: 1251 - DNA, 20 bp, Artificial Sequence
  source: /note="Description of Artificial Sequence: Synthetic oligonucleotide"
ccatcttggctcgcatgagg

SEQ ID NO: 1252 - DNA, 20 bp, Artificial Sequence
  source: /note="Description of Artificial Sequence: Synthetic oligonucleotide"
tccatcttggctcgcatgag

SEQ ID NO: 1253 - DNA, 20 bp, Artificial Sequence
  source: /note="Description of Artificial Sequence: Synthetic oligonucleotide"
tgtccatcttggctcgcatg

SEQ ID NO: 1254 - DNA, 20 bp, Artificial Sequence
  source: /note="Description of Artificial Sequence: Synthetic oligonucleotide"
ttgtccatcttggctcgcat

SEQ ID NO: 1255 - DNA, 20 bp, Artificial Sequence
  source: /note="Description of Artificial Sequence: Synthetic oligonucleotide"
attgtccatcttggctcgca

SEQ ID NO: 1256 - DNA, 20 bp, Artificial Sequence
  source: /note="Description of Artificial Sequence: Synthetic oligonucleotide"
cattgtccatcttggctcgc

SEQ ID NO: 1257 - DNA, 20 bp, Artificial Sequence
  source: /note="Description of Artificial Sequence: Synthetic oligonucleotide"
ccattgtccatcttggctcg

SEQ ID NO: 1258 - DNA, 20 bp, Artificial Sequence
  source: /note="Description of Artificial Sequence: Synthetic oligonucleotide"
cccattgtccatcttggctc

SEQ ID NO: 1259 - DNA, 20 bp, Artificial Sequence
  source: /note="Description of Artificial Sequence: Synthetic oligonucleotide"
ccccattgtccatcttggct

SEQ ID NO: 1260 - DNA, 20 bp, Artificial Sequence
  source: /note="Description of Artificial Sequence: Synthetic oligonucleotide"
tccccattgtccatcttggc

SEQ ID NO: 1261 - DNA, 20 bp, Artificial Sequence
  source: /note="Description of Artificial Sequence: Synthetic oligonucleotide"
ctccccattgtccatcttgg

SEQ ID NO: 1262 - DNA, 20 bp, Artificial Sequence
  source: /note="Description of Artificial Sequence: Synthetic oligonucleotide"
cctccccattgtccatcttg

SEQ ID NO: 1263 - DNA, 20 bp, Artificial Sequence
  source: /note="Description of Artificial Sequence: Synthetic oligonucleotide"
gcctccccattgtccatctt

SEQ ID NO: 1264 - DNA, 20 bp, Artificial Sequence
  source: /note="Description of Artificial Sequence: Synthetic oligonucleotide"
ggcctccccattgtccatct

SEQ ID NO: 1265 - DNA, 20 bp, Artificial Sequence
  source: /note="Description of Artificial Sequence: Synthetic oligonucleotide"
aggcctccccattgtccatc

SEQ ID NO: 1266 - DNA, 20 bp, Artificial Sequence
  source: /note="Description of Artificial Sequence: Synthetic oligonucleotide"
caggcctccccattgtccat

SEQ ID NO: 1267 - DNA, 20 bp, Artificial Sequence
  source: /note="Description of Artificial Sequence: Synthetic oligonucleotide"
gcaggcctccccattgtcca

SEQ ID NO: 1268 - DNA, 20 bp, Artificial Sequence
  source: /note="Description of Artificial Sequence: Synthetic oligonucleotide"
agcaggcctccccattgtcc

SEQ ID NO: 1269 - DNA, 20 bp, Artificial Sequence
  source: /note="Description of Artificial Sequence: Synthetic oligonucleotide"
aagcaggcctccccattgtc

SEQ ID NO: 1270 - DNA, 20 bp, Artificial Sequence
  source: /note="Description of Artificial Sequence: Synthetic oligonucleotide"
gaagcaggcctccccattgt

SEQ ID NO: 1271 - DNA, 20 bp, Artificial Sequence
  source: /note="Description of Artificial Sequence: Synthetic oligonucleotide"
tgaagcaggcctccccattg

SEQ ID NO: 1272 - DNA, 20 bp, Artificial Sequence
  source: /note="Description of Artificial Sequence: Synthetic oligonucleotide"
atgaagcaggcctccccatt

SEQ ID NO: 1273 - DNA, 20 bp, Artificial Sequence
  source: /note="Description of Artificial Sequence: Synthetic oligonucleotide"
gatgaagcaggcctccccat

SEQ ID NO: 1274 - DNA, 20 bp, Artificial Sequence
  source: /note="Description of Artificial Sequence: Synthetic oligonucleotide"
ggatgaagcaggcctcccca

SEQ ID NO: 1275 - DNA, 20 bp, Artificial Sequence
  source: /note="Description of Artificial Sequence: Synthetic oligonucleotide"
aggatgaagcaggcctcccc

SEQ ID NO: 1276 - DNA, 20 bp, Artificial Sequence
  source: /note="Description of Artificial Sequence: Synthetic oligonucleotide"
gaggatgaagcaggcctccc

SEQ ID NO: 1277 - DNA, 20 bp, Artificial Sequence
  source: /note="Description of Artificial Sequence: Synthetic oligonucleotide"
tgaggatgaagcaggcctcc

SEQ ID NO: 1278 - DNA, 20 bp, Artificial Sequence
  source: /note="Description of Artificial Sequence: Synthetic oligonucleotide"
ctgaggatgaagcaggcctc

SEQ ID NO: 1279 - DNA, 20 bp, Artificial Sequence
  source: /note="Description of Artificial Sequence: Synthetic oligonucleotide"
gctgaggatgaagcaggcct

SEQ ID NO: 1280 - DNA, 20 bp, Artificial Sequence
  source: /note="Description of Artificial Sequence: Synthetic oligonucleotide"
tgctgaggatgaagcaggcc

SEQ ID NO: 1281 - DNA, 20 bp, Artificial Sequence
  source: /note="Description of Artificial Sequence: Synthetic oligonucleotide"
ctgctgaggatgaagcaggc

SEQ ID NO: 1282 - DNA, 20 bp, Artificial Sequence
  source: /note="Description of Artificial Sequence: Synthetic oligonucleotide"
gctgctgaggatgaagcagg

SEQ ID NO: 1283 - DNA, 20 bp, Artificial Sequence
  source: /note="Description of Artificial Sequence: Synthetic oligonucleotide"
tgctgctgaggatgaagcag

SEQ ID NO: 1284 - DNA, 20 bp, Artificial Sequence
  source: /note="Description of Artificial Sequence: Synthetic oligonucleotide"
ctgctgctgaggatgaagca

SEQ ID NO: 1285 - DNA, 20 bp, Artificial Sequence
  source: /note="Description of Artificial Sequence: Synthetic oligonucleotide"
cctgctgctgaggatgaagc

SEQ ID NO: 1286 - DNA, 20 bp, Artificial Sequence
  source: /note="Description of Artificial Sequence: Synthetic oligonucleotide"
tcctgctgctgaggatgaag

SEQ ID NO: 1287 - DNA, 20 bp, Artificial Sequence
  source: /note="Description of Artificial Sequence: Synthetic oligonucleotide"
ttcctgctgctgaggatgaa

SEQ ID NO: 1288 - DNA, 20 bp, Artificial Sequence
  source: /note="Description of Artificial Sequence: Synthetic oligonucleotide"
gttcctgctgctgaggatga

SEQ ID NO: 1289 - DNA, 20 bp, Artificial Sequence
  source: /note="Description of Artificial Sequence: Synthetic oligonucleotide"
cgttcctgctgctgaggatg

SEQ ID NO: 1290 - DNA, 20 bp, Artificial Sequence
  source: /note="Description of Artificial Sequence: Synthetic oligonucleotide"
tcgttcctgctgctgaggat

SEQ ID NO: 1291 - DNA, 20 bp, Artificial Sequence
  source: /note="Description of Artificial Sequence: Synthetic oligonucleotide"
ctcgttcctgctgctgagga

SEQ ID NO: 1292 - DNA, 20 bp, Artificial Sequence
  source: /note="Description of Artificial Sequence: Synthetic oligonucleotide"
cctcgttcctgctgctgagg

SEQ ID NO: 1293 - DNA, 20 bp, Artificial Sequence
  source: /note="Description of Artificial Sequence: Synthetic oligonucleotide"
cacctcgttcctgctgctga

SEQ ID NO: 1294 - DNA, 20 bp, Artificial Sequence
  source: /note="Description of Artificial Sequence: Synthetic oligonucleotide"
ccacctcgttcctgctgctg

SEQ ID NO: 1295 - DNA, 20 bp, Artificial Sequence
  source: /note="Description of Artificial Sequence: Synthetic oligonucleotide"
tccacctcgttcctgctgct

SEQ ID NO: 1296 - DNA, 20 bp, Artificial Sequence
  source: /note="Description of Artificial Sequence: Synthetic oligonucleotide"
gtccacctcgttcctgctgc

SEQ ID NO: 1297 - DNA, 20 bp, Artificial Sequence
  source: /note="Description of Artificial Sequence: Synthetic oligonucleotide"
ggtccacctcgttcctgctg

SEQ ID NO: 1298 - DNA, 20 bp, Artificial Sequence
  source: /note="Description of Artificial Sequence: Synthetic oligonucleotide"
cggtccacctcgttcctgct

SEQ ID NO: 1299 - DNA, 20 bp, Artificial Sequence
  source: /note="Description of Artificial Sequence: Synthetic oligonucleotide"
gcggtccacctcgttcctgc

SEQ ID NO: 1300 - DNA, 20 bp, Artificial Sequence
  source: /note="Description of Artificial Sequence: Synthetic oligonucleotide"
tgcggtccacctcgttcctg

SEQ ID NO: 1301 - DNA, 20 bp, Artificial Sequence
  source: /note="Description of Artificial Sequence: Synthetic oligonucleotide"
cgtgcggtccacctcgttcc

SEQ ID NO: 1302 - DNA, 20 bp, Artificial Sequence
  source: /note="Description of Artificial Sequence: Synthetic oligonucleotide"
ccgtgcggtccacctcgttc

SEQ ID NO: 1303 - DNA, 20 bp, Artificial Sequence
  source: /note="Description of Artificial Sequence: Synthetic oligonucleotide"
gccgtgcggtccacctcgtt

SEQ ID NO: 1304 - DNA, 20 bp, Artificial Sequence
  source: /note="Description of Artificial Sequence: Synthetic oligonucleotide"
agccgtgcggtccacctcgt

SEQ ID NO: 1305 - DNA, 20 bp, Artificial Sequence
  source: /note="Description of Artificial Sequence: Synthetic oligonucleotide"
cagccgtgcggtccacctcg

SEQ ID NO: 1306 - DNA, 20 bp, Artificial Sequence
  source: /note="Description of Artificial Sequence: Synthetic oligonucleotide"
gcagccgtgcggtccacctc

SEQ ID NO: 1307 - DNA, 20 bp, Artificial Sequence
  source: /note="Description of Artificial Sequence: Synthetic oligonucleotide"
tgcagccgtgcggtccacct

SEQ ID NO: 1308 - DNA, 20 bp, Artificial Sequence
  source: /note="Description of Artificial Sequence: Synthetic oligonucleotide"
ctgcagccgtgcggtccacc

SEQ ID NO: 1309 - DNA, 20 bp, Artificial Sequence
  source: /note="Description of Artificial Sequence: Synthetic oligonucleotide"
tctgcagccgtgcggtccac

SEQ ID NO: 1310 - DNA, 20 bp, Artificial Sequence
  source: /note="Description of Artificial Sequence: Synthetic oligonucleotide"
gtctgcagccgtgcggtcca

SEQ ID NO: 1311 - DNA, 20 bp, Artificial Sequence
  source: /note="Description of Artificial Sequence: Synthetic oligonucleotide"
ggtctgcagccgtgcggtcc

SEQ ID NO: 1312 - DNA, 20 bp, Artificial Sequence
  source: /note="Description of Artificial Sequence: Synthetic oligonucleotide"
tggtctgcagccgtgcggtc

SEQ ID NO: 1313 - DNA, 20 bp, Artificial Sequence
  source: /note="Description of Artificial Sequence: Synthetic oligonucleotide"
gtggtctgcagccgtgcggt

SEQ ID NO: 1314 - DNA, 20 bp, Artificial Sequence
  source: /note="Description of Artificial Sequence: Synthetic oligonucleotide"
ggtggtctgcagccgtgcgg

SEQ ID NO: 1315 - DNA, 20 bp, Artificial Sequence
  source: /note="Description of Artificial Sequence: Synthetic oligonucleotide"
tggtggtctgcagccgtgcg

SEQ ID NO: 1316 - DNA, 20 bp, Artificial Sequence
  source: /note="Description of Artificial Sequence: Synthetic oligonucleotide"
ctggtggtctgcagccgtgc

SEQ ID NO: 1317 - DNA, 20 bp, Artificial Sequence
  source: /note="Description of Artificial Sequence: Synthetic oligonucleotide"
tctggtggtctgcagccgtg

SEQ ID NO: 1318 - DNA, 20 bp, Artificial Sequence
  source: /note="Description of Artificial Sequence: Synthetic oligonucleotide"
gtctggtggtctgcagccgt

SEQ ID NO: 1319 - DNA, 20 bp, Artificial Sequence
  source: /note="Description of Artificial Sequence: Synthetic oligonucleotide"
ggtctggtggtctgcagccg

SEQ ID NO: 1320 - DNA, 20 bp, Artificial Sequence
  source: /note="Description of Artificial Sequence: Synthetic oligonucleotide"
tggtctggtggtctgcagcc

SEQ ID NO: 1321 - DNA, 20 bp, Artificial Sequence
  source: /note="Description of Artificial Sequence: Synthetic oligonucleotide"
atggtctggtggtctgcagc

SEQ ID NO: 1322 - DNA, 20 bp, Artificial Sequence
  source: /note="Description of Artificial Sequence: Synthetic oligonucleotide"
gatggtctggtggtctgcag

SEQ ID NO: 1323 - DNA, 20 bp, Artificial Sequence
  source: /note="Description of Artificial Sequence: Synthetic oligonucleotide"
ggatggtctggtggtctgca

SEQ ID NO: 1324 - DNA, 20 bp, Artificial Sequence
  source: /note="Description of Artificial Sequence: Synthetic oligonucleotide"
aggatggtctggtggtctgc

SEQ ID NO: 1325 - DNA, 20 bp, Artificial Sequence
  source: /note="Description of Artificial Sequence: Synthetic oligonucleotide"
caggatggtctggtggtctg

SEQ ID NO: 1326 - DNA, 20 bp, Artificial Sequence
  source: /note="Description of Artificial Sequence: Synthetic oligonucleotide"
gcaggatggtctggtggtct

SEQ ID NO: 1327 - DNA, 20 bp, Artificial Sequence
  source: /note="Description of Artificial Sequence: Synthetic oligonucleotide"
gcgcaggatggtctggtggt

SEQ ID NO: 1328 - DNA, 20 bp, Artificial Sequence
  source: /note="Description of Artificial Sequence: Synthetic oligonucleotide"
cgcgcaggatggtctggtgg

SEQ ID NO: 1329 - DNA, 20 bp, Artificial Sequence
  source: /note="Description of Artificial Sequence: Synthetic oligonucleotide"
tccttcacggcccaggcgcg

SEQ ID NO: 1330 - DNA, 20 bp, Artificial Sequence
  source: /note="Description of Artificial Sequence: Synthetic oligonucleotide"
gtccttcacggcccaggcgc

SEQ ID NO: 1331 - DNA, 20 bp, Artificial Sequence
  source: /note="Description of Artificial Sequence: Synthetic oligonucleotide"
agtccttcacggcccaggcg

SEQ ID NO: 1332 - DNA, 20 bp, Artificial Sequence
  source: /note="Description of Artificial Sequence: Synthetic oligonucleotide"
aagtccttcacggcccaggc

SEQ ID NO: 1333 - DNA, 20 bp, Artificial Sequence
  source: /note="Description of Artificial Sequence: Synthetic oligonucleotide"
gaagtccttcacggcccagg

SEQ ID NO: 1334 - DNA, 20 bp, Artificial Sequence
  source: /note="Description of Artificial Sequence: Synthetic oligonucleotide"
cgaagtccttcacggcccag

SEQ ID NO: 1335 - DNA, 20 bp, Artificial Sequence
  source: /note="Description of Artificial Sequence: Synthetic oligonucleotide"
gcgaagtccttcacggccca

SEQ ID NO: 1336 - DNA, 20 bp, Artificial Sequence
  source: /note="Description of Artificial Sequence: Synthetic oligonucleotide"
ggcgaagtccttcacggccc

SEQ ID NO: 1337 - DNA, 20 bp, Artificial Sequence
  source: /note="Description of Artificial Sequence: Synthetic oligonucleotide"
gggcgaagtccttcacggcc

SEQ ID NO: 1338 - DNA, 20 bp, Artificial Sequence
  source: /note="Description of Artificial Sequence: Synthetic oligonucleotide"
gaggatctggacgtagaggg

SEQ ID NO: 1339 - DNA, 20 bp, Artificial Sequence
  source: /note="Description of Artificial Sequence: Synthetic oligonucleotide"
ttgaggatctggacgtagag

SEQ ID NO: 1340 - DNA, 20 bp, Artificial Sequence
  source: /note="Description of Artificial Sequence: Synthetic oligonucleotide"
tttgaggatctggacgtaga

SEQ ID NO: 1341 - DNA, 20 bp, Artificial Sequence
  source: /note="Description of Artificial Sequence: Synthetic oligonucleotide"
gtttgaggatctggacgtag

SEQ ID NO: 1342 - DNA, 20 bp, Artificial Sequence
  source: /note="Description of Artificial Sequence: Synthetic oligonucleotide"
ggtttgaggatctggacgta

SEQ ID NO: 1343 - DNA, 20 bp, Artificial Sequence
  source: /note="Description of Artificial Sequence: Synthetic oligonucleotide"
aggtttgaggatctggacgt

SEQ ID NO: 1344 - DNA, 20 bp, Artificial Sequence
  source: /note="Description of Artificial Sequence: Synthetic oligonucleotide"
caggtttgaggatctggacg

SEQ ID NO: 1345 - DNA, 20 bp, Artificial Sequence
  source: /note="Description of Artificial Sequence: Synthetic oligonucleotide"
tcaggtttgaggatctggac

SEQ ID NO: 1346 - DNA, 20 bp, Artificial Sequence
  source: /note="Description of Artificial Sequence: Synthetic oligonucleotide"
ttcaggtttgaggatctgga

SEQ ID NO: 1347 - DNA, 20 bp, Artificial Sequence
  source: /note="Description of Artificial Sequence: Synthetic oligonucleotide"
tttcaggtttgaggatctgg

SEQ ID NO: 1348 - DNA, 20 bp, Artificial Sequence
  source: /note="Description of Artificial Sequence: Synthetic oligonucleotide"
ttttcaggtttgaggatctg

SEQ ID NO: 1349 - DNA, 20 bp, Artificial Sequence
  source: /note="Description of Artificial Sequence: Synthetic oligonucleotide"
gttttcaggtttgaggatct

SEQ ID NO: 1350 - DNA, 20 bp, Artificial Sequence
  source: /note="Description of Artificial Sequence: Synthetic oligonucleotide"
tgttttcaggtttgaggatc

SEQ ID NO: 1351 - DNA, 20 bp, Artificial Sequence
  source: /note="Description of Artificial Sequence: Synthetic oligonucleotide"
ttgttttcaggtttgaggat

SEQ ID NO: 1352 - DNA, 20 bp, Artificial Sequence
  source: /note="Description of Artificial Sequence: Synthetic oligonucleotide"
cttgttttcaggtttgagga

SEQ ID NO: 1353 - DNA, 20 bp, Artificial Sequence
  source: /note="Description of Artificial Sequence: Synthetic oligonucleotide"
acttgttttcaggtttgagg

SEQ ID NO: 1354 - DNA, 20 bp, Artificial Sequence
  source: /note="Description of Artificial Sequence: Synthetic oligonucleotide"
aacttgttttcaggtttgag

SEQ ID NO: 1355 - DNA, 20 bp, Artificial Sequence
  source: /note="Description of Artificial Sequence: Synthetic oligonucleotide"
gaaacttgttttcaggtttg

SEQ ID NO: 1356 - DNA, 20 bp, Artificial Sequence
  source: /note="Description of Artificial Sequence: Synthetic oligonucleotide"
gtgaaacttgttttcaggtt

SEQ ID NO: 1357 - DNA, 20 bp, Artificial Sequence
  source: /note="Description of Artificial Sequence: Synthetic oligonucleotide"
cgtgaaacttgttttcaggt

SEQ ID NO: 1358 - DNA, 20 bp, Artificial Sequence
  source: /note="Description of Artificial Sequence: Synthetic oligonucleotide"
acgtgaaacttgttttcagg

SEQ ID NO: 1359 - DNA, 20 bp, Artificial Sequence
  source: /note="Description of Artificial Sequence: Synthetic oligonucleotide"
gacgtgaaacttgttttcag

SEQ ID NO: 1360 - DNA, 20 bp, Artificial Sequence
  source: /note="Description of Artificial Sequence: Synthetic oligonucleotide"
tgacgtgaaacttgttttca

SEQ ID NO: 1361 - DNA, 20 bp, Artificial Sequence
  source: /note="Description of Artificial Sequence: Synthetic oligonucleotide"
ttgacgtgaaacttgttttc

SEQ ID NO: 1362 - DNA, 20 bp, Artificial Sequence
  source: /note="Description of Artificial Sequence: Synthetic oligonucleotide"
cttgacgtgaaacttgtttt

SEQ ID NO: 1363 - DNA, 20 bp, Artificial Sequence
  source: /note="Description of Artificial Sequence: Synthetic oligonucleotide"
acttgacgtgaaacttgttt

SEQ ID NO: 1364 - DNA, 20 bp, Artificial Sequence
  source: /note="Description of Artificial Sequence: Synthetic oligonucleotide"
aacttgacgtgaaacttgtt

SEQ ID NO: 1365 - DNA, 20 bp, Artificial Sequence
  source: /note="Description of Artificial Sequence: Synthetic oligonucleotide"
aaacttgacgtgaaacttgt

SEQ ID NO: 1366 - DNA, 20 bp, Artificial Sequence
  source: /note="Description of Artificial Sequence: Synthetic oligonucleotide"
caaacttgacgtgaaacttg

SEQ ID NO: 1367 - DNA, 20 bp, Artificial Sequence
  source: /note="Description of Artificial Sequence: Synthetic oligonucleotide"
gcaaacttgacgtgaaactt

SEQ ID NO: 1368 - DNA, 20 bp, Artificial Sequence
  source: /note="Description of Artificial Sequence: Synthetic oligonucleotide"
agcaaacttgacgtgaaact

SEQ ID NO: 1369 - DNA, 20 bp, Artificial Sequence
  source: /note="Description of Artificial Sequence: Synthetic oligonucleotide"
cagcaaacttgacgtgaaac

SEQ ID NO: 1370 - DNA, 20 bp, Artificial Sequence
  source: /note="Description of Artificial Sequence: Synthetic oligonucleotide"
tcagcaaacttgacgtgaaa

SEQ ID NO: 1371 - DNA, 20 bp, Artificial Sequence
  source: /note="Description of Artificial Sequence: Synthetic oligonucleotide"
gtcagcaaacttgacgtgaa

SEQ ID NO: 1372 - DNA, 20 bp, Artificial Sequence
  source: /note="Description of Artificial Sequence: Synthetic oligonucleotide"
ggtcagcaaacttgacgtga

SEQ ID NO: 1373 - DNA, 20 bp, Artificial Sequence
  source: /note="Description of Artificial Sequence: Synthetic oligonucleotide"
tggtcagcaaacttgacgtg

SEQ ID NO: 1374 - DNA, 20 bp, Artificial Sequence
  source: /note="Description of Artificial Sequence: Synthetic oligonucleotide"
gtggtcagcaaacttgacgt

SEQ ID NO: 1375 - DNA, 20 bp, Artificial Sequence
  source: /note="Description of Artificial Sequence: Synthetic oligonucleotide"
cgtggtcagcaaacttgacg

SEQ ID NO: 1376 - DNA, 20 bp, Artificial Sequence
  source: /note="Description of Artificial Sequence: Synthetic oligonucleotide"
acgtggtcagcaaacttgac

SEQ ID NO: 1377 - DNA, 20 bp, Artificial Sequence
  source: /note="Description of Artificial Sequence: Synthetic oligonucleotide"
cacgtggtcagcaaacttga

SEQ ID NO: 1378 - DNA, 20 bp, Artificial Sequence
  source: /note="Description of Artificial Sequence: Synthetic oligonucleotide"
tcctcctcacacaccacgtg

SEQ ID NO: 1379 - DNA, 20 bp, Artificial Sequence
  source: /note="Description of Artificial Sequence: Synthetic oligonucleotide"
ctcctcctcacacaccacgt

SEQ ID NO: 1380 - DNA, 20 bp, Artificial Sequence
  source: /note="Description of Artificial Sequence: Synthetic oligonucleotide"
actcctcctcacacaccacg

SEQ ID NO: 1381 - DNA, 20 bp, Artificial Sequence
  source: /note="Description of Artificial Sequence: Synthetic oligonucleotide"
cactcctcctcacacaccac

SEQ ID NO: 1382 - DNA, 20 bp, Artificial Sequence
  source: /note="Description of Artificial Sequence: Synthetic oligonucleotide"
gcactcctcctcacacacca

SEQ ID NO: 1383 - DNA, 20 bp, Artificial Sequence
  source: /note="Description of Artificial Sequence: Synthetic oligonucleotide"
tgcactcctcctcacacacc

SEQ ID NO: 1384 - DNA, 20 bp, Artificial Sequence
  source: /note="Description of Artificial Sequence: Synthetic oligonucleotide"
ttgcactcctcctcacacac

SEQ ID NO: 1385 - DNA, 20 bp, Artificial Sequence
  source: /note="Description of Artificial Sequence: Synthetic oligonucleotide"
cttgcactcctcctcacaca

SEQ ID NO: 1386 - DNA, 20 bp, Artificial Sequence
  source: /note="Description of Artificial Sequence: Synthetic oligonucleotide"
tacttgcactcctcctcaca

SEQ ID NO: 1387 - DNA, 20 bp, Artificial Sequence
  source: /note="Description of Artificial Sequence: Synthetic oligonucleotide"
gtacttgcactcctcctcac

SEQ ID NO: 1388 - DNA, 20 bp, Artificial Sequence
  source: /note="Description of Artificial Sequence: Synthetic oligonucleotide"
cgtacttgcactcctcctca

SEQ ID NO: 1389 - DNA, 20 bp, Artificial Sequence
  source: /note="Description of Artificial Sequence: Synthetic oligonucleotide"
gcgtacttgcactcctcctc

SEQ ID NO: 1390 - DNA, 20 bp, Artificial Sequence
  source: /note="Description of Artificial Sequence: Synthetic oligonucleotide"
ggcgtacttgcactcctcct

SEQ ID NO: 1391 - DNA, 20 bp, Artificial Sequence
  source: /note="Description of Artificial Sequence: Synthetic oligonucleotide"
atggcgtacttgcactcctc

SEQ ID NO: 1392 - DNA, 20 bp, Artificial Sequence
  source: /note="Description of Artificial Sequence: Synthetic oligonucleotide"
catggcgtacttgcactcct

SEQ ID NO: 1393 - DNA, 20 bp, Artificial Sequence
  source: /note="Description of Artificial Sequence: Synthetic oligonucleotide"
gcatggcgtacttgcactcc

SEQ ID NO: 1394 - DNA, 20 bp, Artificial Sequence
  source: /note="Description of Artificial Sequence: Synthetic oligonucleotide"
agcatggcgtacttgcactc

SEQ ID NO: 1395 - DNA, 20 bp, Artificial Sequence
  source: /note="Description of Artificial Sequence: Synthetic oligonucleotide"
cagcatggcgtacttgcact

SEQ ID NO: 1396 - DNA, 20 bp, Artificial Sequence
  source: /note="Description of Artificial Sequence: Synthetic oligonucleotide"
ccagcatggcgtacttgcac

SEQ ID NO: 1397 - DNA, 20 bp, Artificial Sequence
  source: /note="Description of Artificial Sequence: Synthetic oligonucleotide"
gccagcatggcgtacttgca

SEQ ID NO: 1398 - DNA, 20 bp, Artificial Sequence
  source: /note="Description of Artificial Sequence: Synthetic oligonucleotide"
cgccagcatggcgtacttgc

SEQ ID NO: 1399 - DNA, 20 bp, Artificial Sequence
  source: /note="Description of Artificial Sequence: Synthetic oligonucleotide"
gcgccagcatggcgtacttg

SEQ ID NO: 1400 - DNA, 20 bp, Artificial Sequence
  source: /note="Description of Artificial Sequence: Synthetic oligonucleotide"
agcgccagcatggcgtactt

SEQ ID NO: 1401 - DNA, 20 bp, Artificial Sequence
  source: /note="Description of Artificial Sequence: Synthetic oligonucleotide"
cagcgccagcatggcgtact

SEQ ID NO: 1402 - DNA, 20 bp, Artificial Sequence
  source: /note="Description of Artificial Sequence: Synthetic oligonucleotide"
tcagcgccagcatggcgtac

SEQ ID NO: 1403 - DNA, 20 bp, Artificial Sequence
  source: /note="Description of Artificial Sequence: Synthetic oligonucleotide"
ttcagcgccagcatggcgta

SEQ ID NO: 1404 - DNA, 20 bp, Artificial Sequence
  source: /note="Description of Artificial Sequence: Synthetic oligonucleotide"
gttcagcgccagcatggcgt

SEQ ID NO: 1405 - DNA, 20 bp, Artificial Sequence
  source: /note="Description of Artificial Sequence: Synthetic oligonucleotide"
agttcagcgccagcatggcg

SEQ ID NO: 1406 - DNA, 20 bp, Artificial Sequence
  source: /note="Description of Artificial Sequence: Synthetic oligonucleotide"
cagttcagcgccagcatggc

SEQ ID NO: 1407 - DNA, 20 bp, Artificial Sequence
  source: /note="Description of Artificial Sequence: Synthetic oligonucleotide"
gcagttcagcgccagcatgg

SEQ ID NO: 1408 - DNA, 20 bp, Artificial Sequence
  source: /note="Description of Artificial Sequence: Synthetic oligonucleotide"
tgcagttcagcgccagcatg

SEQ ID NO: 1409 - DNA, 20 bp, Artificial Sequence
  source: /note="Description of Artificial Sequence: Synthetic oligonucleotide"
atgcagttcagcgccagcat

SEQ ID NO: 1410 - DNA, 20 bp, Artificial Sequence
  source: /note="Description of Artificial Sequence: Synthetic oligonucleotide"
gatgcagttcagcgccagca

SEQ ID NO: 1411 - DNA, 20 bp, Artificial Sequence
  source: /note="Description of Artificial Sequence: Synthetic oligonucleotide"
agatgcagttcagcgccagc

SEQ ID NO: 1412 - DNA, 20 bp, Artificial Sequence
  source: /note="Description of Artificial Sequence: Synthetic oligonucleotide"
cagatgcagttcagcgccag

SEQ ID NO: 1413 - DNA, 20 bp, Artificial Sequence
  source: /note="Description of Artificial Sequence: Synthetic oligonucleotide"
gcagatgcagttcagcgcca

SEQ ID NO: 1414 - DNA, 20 bp, Artificial Sequence
  source: /note="Description of Artificial Sequence: Synthetic oligonucleotide"
ggcagatgcagttcagcgcc

SEQ ID NO: 1415 - DNA, 20 bp, Artificial Sequence
  source: /note="Description of Artificial Sequence: Synthetic oligonucleotide"
gggcagatgcagttcagcgc

SEQ ID NO: 1416 - DNA, 20 bp, Artificial Sequence
  source: /note="Description of Artificial Sequence: Synthetic oligonucleotide"
cgggcagatgcagttcagcg

SEQ ID NO: 1417 - DNA, 20 bp, Artificial Sequence
  source: /note="Description of Artificial Sequence: Synthetic oligonucleotide"
ccgggcagatgcagttcagc

SEQ ID NO: 1418 - DNA, 20 bp, Artificial Sequence
  source: /note="Description of Artificial Sequence: Synthetic oligonucleotide"
cgccgggcagatgcagttca

SEQ ID NO: 1419 - DNA, 20 bp, Artificial Sequence
  source: /note="Description of Artificial Sequence: Synthetic oligonucleotide"
tcgccgggcagatgcagttc

SEQ ID NO: 1420 - DNA, 20 bp, Artificial Sequence
  source: /note="Description of Artificial Sequence: Synthetic oligonucleotide"
gtcgccgggcagatgcagtt

SEQ ID NO: 1421 - DNA, 20 bp, Artificial Sequence
  source: /note="Description of Artificial Sequence: Synthetic oligonucleotide"
ggtcgccgggcagatgcagt

SEQ ID NO: 1422 - DNA, 20 bp, Artificial Sequence
  source: /note="Description of Artificial Sequence: Synthetic oligonucleotide"
aggtcgccgggcagatgcag

SEQ ID NO: 1423 - DNA, 20 bp, Artificial Sequence
  source: /note="Description of Artificial Sequence: Synthetic oligonucleotide"
gaggtcgccgggcagatgca

SEQ ID NO: 1424 - DNA, 20 bp, Artificial Sequence
  source: /note="Description of Artificial Sequence: Synthetic oligonucleotide"
ggaggtcgccgggcagatgc

SEQ ID NO: 1425 - DNA, 20 bp, Artificial Sequence
  source: /note="Description of Artificial Sequence: Synthetic oligonucleotide"
tggaggtcgccgggcagatg

SEQ ID NO: 1426 - DNA, 20 bp, Artificial Sequence
  source: /note="Description of Artificial Sequence: Synthetic oligonucleotide"
gtggaggtcgccgggcagat

SEQ ID NO: 1427 - DNA, 20 bp, Artificial Sequence
  source: /note="Description of Artificial Sequence: Synthetic oligonucleotide"
ggtggaggtcgccgggcaga

SEQ ID NO: 1428 - DNA, 20 bp, Artificial Sequence
  source: /note="Description of Artificial Sequence: Synthetic oligonucleotide"
agggtggaggtcgccgggca

SEQ ID NO: 1429 - DNA, 20 bp, Artificial Sequence
  source: /note="Description of Artificial Sequence: Synthetic oligonucleotide"
tgagggtggaggtcgccggg

SEQ ID NO: 1430 - DNA, 20 bp, Artificial Sequence
  source: /note="Description of Artificial Sequence: Synthetic oligonucleotide"
atgagggtggaggtcgccgg

SEQ ID NO: 1431 - DNA, 20 bp, Artificial Sequence
  source: /note="Description of Artificial Sequence: Synthetic oligonucleotide"
gatgagggtggaggtcgccg

SEQ ID NO: 1432 - DNA, 20 bp, Artificial Sequence
  source: /note="Description of Artificial Sequence: Synthetic oligonucleotide"
tgatgagggtggaggtcgcc

SEQ ID NO: 1433 - DNA, 20 bp, Artificial Sequence
  source: /note="Description of Artificial Sequence: Synthetic oligonucleotide"
gtgatgagggtggaggtcgc

SEQ ID NO: 1434 - DNA, 20 bp, Artificial Sequence
  source: /note="Description of Artificial Sequence: Synthetic oligonucleotide"
ggtgatgagggtggaggtcg

SEQ ID NO: 1435 - DNA, 20 bp, Artificial Sequence
  source: /note="Description of Artificial Sequence: Synthetic oligonucleotide"
gggtgatgagggtggaggtc

SEQ ID NO: 1436 - DNA, 20 bp, Artificial Sequence
  source: /note="Description of Artificial Sequence: Synthetic oligonucleotide"
agggtgatgagggtggaggt

SEQ ID NO: 1437 - DNA, 20 bp, Artificial Sequence
  source: /note="Description of Artificial Sequence: Synthetic oligonucleotide"
cagggtgatgagggtggagg

SEQ ID NO: 1438 - DNA, 20 bp, Artificial Sequence
  source: /note="Description of Artificial Sequence: Synthetic oligonucleotide"
gcagggtgatgagggtggag

SEQ ID NO: 1439 - DNA, 20 bp, Artificial Sequence
  source: /note="Description of Artificial Sequence: Synthetic oligonucleotide"
agcagggtgatgagggtgga

SEQ ID NO: 1440 - DNA, 20 bp, Artificial Sequence
  source: /note="Description of Artificial Sequence: Synthetic oligonucleotide"
cagcagggtgatgagggtgg

SEQ ID NO: 1441 - DNA, 20 bp, Artificial Sequence
  source: /note="Description of Artificial Sequence: Synthetic oligonucleotide"
ccagcagggtgatgagggtg

SEQ ID NO: 1442 - DNA, 20 bp, Artificial Sequence
  source: /note="Description of Artificial Sequence: Synthetic oligonucleotide"
accagcagggtgatgagggt

SEQ ID NO: 1443 - DNA, 20 bp, Artificial Sequence
  source: /note="Description of Artificial Sequence: Synthetic oligonucleotide"
caccagcagggtgatgaggg

SEQ ID NO: 1444 - DNA, 20 bp, Artificial Sequence
  source: /note="Description of Artificial Sequence: Synthetic oligonucleotide"
gcaccagcagggtgatgagg

SEQ ID NO: 1445 - DNA, 20 bp, Artificial Sequence
  source: /note="Description of Artificial Sequence: Synthetic oligonucleotide"
tgcaccagcagggtgatgag

SEQ ID NO: 1446 - DNA, 20 bp, Artificial Sequence
  source: /note="Description of Artificial Sequence: Synthetic oligonucleotide"
gtgcaccagcagggtgatga

SEQ ID NO: 1447 - DNA, 20 bp, Artificial Sequence
  source: /note="Description of Artificial Sequence: Synthetic oligonucleotide"
tgtgcaccagcagggtgatg

SEQ ID NO: 1448 - DNA, 20 bp, Artificial Sequence
  source: /note="Description of Artificial Sequence: Synthetic oligonucleotide"
gtgtgcaccagcagggtgat

SEQ ID NO: 1449 - DNA, 20 bp, Artificial Sequence
  source: /note="Description of Artificial Sequence: Synthetic oligonucleotide"
cgtgtgcaccagcagggtga

SEQ ID NO: 1450 - DNA, 20 bp, Artificial Sequence
  source: /note="Description of Artificial Sequence: Synthetic oligonucleotide"
acgtgtgcaccagcagggtg

SEQ ID NO: 1451 - DNA, 20 bp, Artificial Sequence
  source: /note="Description of Artificial Sequence: Synthetic oligonucleotide"
gacgtgtgcaccagcagggt

SEQ ID NO: 1452 - DNA, 20 bp, Artificial Sequence
  source: /note="Description of Artificial Sequence: Synthetic oligonucleotide"
ggacgtgtgcaccagcaggg

SEQ ID NO: 1453 - DNA, 20 bp, Artificial Sequence
  source: /note="Description of Artificial Sequence: Synthetic oligonucleotide"
cgggacgtgtgcaccagcag

SEQ ID NO: 1454 - DNA, 20 bp, Artificial Sequence
  source: /note="Description of Artificial Sequence: Synthetic oligonucleotide"
gcgggacgtgtgcaccagca

SEQ ID NO: 1455 - DNA, 20 bp, Artificial Sequence
  source: /note="Description of Artificial Sequence: Synthetic oligonucleotide"
cgcgggacgtgtgcaccagc

SEQ ID NO: 1456 - DNA, 20 bp, Artificial Sequence
  source: /note="Description of Artificial Sequence: Synthetic oligonucleotide"
tcctgtccctcctggccgcg

SEQ ID NO: 1457 - DNA, 20 bp, Artificial Sequence
  source: /note="Description of Artificial Sequence: Synthetic oligonucleotide"
ctcctgtccctcctggccgc

SEQ ID NO: 1458 - DNA, 20 bp, Artificial Sequence
  source: /note="Description of Artificial Sequence: Synthetic oligonucleotide"
actcctgtccctcctggccg

SEQ ID NO: 1459 - DNA, 20 bp, Artificial Sequence
  source: /note="Description of Artificial Sequence: Synthetic oligonucleotide"
gactcctgtccctcctggcc

SEQ ID NO: 1460 - DNA, 20 bp, Artificial Sequence
  source: /note="Description of Artificial Sequence: Synthetic oligonucleotide"
agactcctgtccctcctggc

SEQ ID NO: 1461 - DNA, 20 bp, Artificial Sequence
  source: /note="Description of Artificial Sequence: Synthetic oligonucleotide"
gagactcctgtccctcctgg

SEQ ID NO: 1462 - DNA, 20 bp, Artificial Sequence
  source: /note="Description of Artificial Sequence: Synthetic oligonucleotide"
ggagactcctgtccctcctg

SEQ ID NO: 1463 - DNA, 20 bp, Artificial Sequence
  source: /note="Description of Artificial Sequence: Synthetic oligonucleotide"
cggagactcctgtccctcct

SEQ ID NO: 1464 - DNA, 20 bp, Artificial Sequence
  source: /note="Description of Artificial Sequence: Synthetic oligonucleotide"
ccggagactcctgtccctcc

SEQ ID NO: 1465 - DNA, 20 bp, Artificial Sequence
  source: /note="Description of Artificial Sequence: Synthetic oligonucleotide"
tccggagactcctgtccctc

SEQ ID NO: 1466 - DNA, 20 bp, Artificial Sequence
  source: /note="Description of Artificial Sequence: Synthetic oligonucleotide"
tgcgctgccactgctccgga

SEQ ID NO: 1467 - DNA, 20 bp, Artificial Sequence
  source: /note="Description of Artificial Sequence: Synthetic oligonucleotide"
atgcgctgccactgctccgg

SEQ ID NO: 1468 - DNA, 20 bp, Artificial Sequence
  source: /note="Description of Artificial Sequence: Synthetic oligonucleotide"
catgcgctgccactgctccg

SEQ ID NO: 1469 - DNA, 20 bp, Artificial Sequence
  source: /note="Description of Artificial Sequence: Synthetic oligonucleotide"
acatgcgctgccactgctcc

SEQ ID NO: 1470 - DNA, 20 bp, Artificial Sequence
  source: /note="Description of Artificial Sequence: Synthetic oligonucleotide"
tacatgcgctgccactgctc

SEQ ID NO: 1471 - DNA, 20 bp, Artificial Sequence
  source: /note="Description of Artificial Sequence: Synthetic oligonucleotide"
atacatgcgctgccactgct

SEQ ID NO: 1472 - DNA, 20 bp, Artificial Sequence
  source: /note="Description of Artificial Sequence: Synthetic oligonucleotide"
catacatgcgctgccactgc

SEQ ID NO: 1473 - DNA, 20 bp, Artificial Sequence
  source: /note="Description of Artificial Sequence: Synthetic oligonucleotide"
ccatacatgcgctgccactg

SEQ ID NO: 1474 - DNA, 20 bp, Artificial Sequence
  source: /note="Description of Artificial Sequence: Synthetic oligonucleotide"
cccatacatgcgctgccact

SEQ ID NO: 1475 - DNA, 20 bp, Artificial Sequence
  source: /note="Description of Artificial Sequence: Synthetic oligonucleotide"
cgcccatacatgcgctgcca

SEQ ID NO: 1476 - DNA, 20 bp, Artificial Sequence
  source: /note="Description of Artificial Sequence: Synthetic oligonucleotide"
gcgcccatacatgcgctgcc

SEQ ID NO: 1477 - DNA, 20 bp, Artificial Sequence
  source: /note="Description of Artificial Sequence: Synthetic oligonucleotide"
agcgcccatacatgcgctgc

SEQ ID NO: 1478 - DNA, 20 bp, Artificial Sequence
  source: /note="Description of Artificial Sequence: Synthetic oligonucleotide"
cagcgcccatacatgcgctg

SEQ ID NO: 1479 - DNA, 20 bp, Artificial Sequence
  source: /note="Description of Artificial Sequence: Synthetic oligonucleotide"
gcagcgcccatacatgcgct

SEQ ID NO: 1480 - DNA, 20 bp, Artificial Sequence
  source: /note="Description of Artificial Sequence: Synthetic oligonucleotide"
agcagcgcccatacatgcgc

SEQ ID NO: 1481 - DNA, 20 bp, Artificial Sequence
  source: /note="Description of Artificial Sequence: Synthetic oligonucleotide"
gagcagcgcccatacatgcg

SEQ ID NO: 1482 - DNA, 20 bp, Artificial Sequence
  source: /note="Description of Artificial Sequence: Synthetic oligonucleotide"
ggagcagcgcccatacatgc

SEQ ID NO: 1483 - DNA, 20 bp, Artificial Sequence
  source: /note="Description of Artificial Sequence: Synthetic oligonucleotide"
cggagcagcgcccatacatg

SEQ ID NO: 1484 - DNA, 20 bp, Artificial Sequence
  source: /note="Description of Artificial Sequence: Synthetic oligonucleotide"
ccggagcagcgcccatacat

SEQ ID NO: 1485 - DNA, 20 bp, Artificial Sequence
  source: /note="Description of Artificial Sequence: Synthetic oligonucleotide"
gccggagcagcgcccataca

SEQ ID NO: 1486 - DNA, 20 bp, Artificial Sequence
  source: /note="Description of Artificial Sequence: Synthetic oligonucleotide"
tgccggagcagcgcccatac

SEQ ID NO: 1487 - DNA, 20 bp, Artificial Sequence
  source: /note="Description of Artificial Sequence: Synthetic oligonucleotide"
ttgccggagcagcgcccata

SEQ ID NO: 1488 - DNA, 20 bp, Artificial Sequence
  source: /note="Description of Artificial Sequence: Synthetic oligonucleotide"
gttgccggagcagcgcccat

SEQ ID NO: 1489 - DNA, 20 bp, Artificial Sequence
  source: /note="Description of Artificial Sequence: Synthetic oligonucleotide"
cgttgccggagcagcgccca

SEQ ID NO: 1490 - DNA, 20 bp, Artificial Sequence
  source: /note="Description of Artificial Sequence: Synthetic oligonucleotide"
tcgttgccggagcagcgccc

SEQ ID NO: 1491 - DNA, 20 bp, Artificial Sequence
  source: /note="Description of Artificial Sequence: Synthetic oligonucleotide"
ctcgttgccggagcagcgcc

SEQ ID NO: 1492 - DNA, 20 bp, Artificial Sequence
  source: /note="Description of Artificial Sequence: Synthetic oligonucleotide"
cctcgttgccggagcagcgc

SEQ ID NO: 1493 - DNA, 20 bp, Artificial Sequence
  source: /note="Description of Artificial Sequence: Synthetic oligonucleotide"
acctcgttgccggagcagcg

SEQ ID NO: 1494 - DNA, 20 bp, Artificial Sequence
  source: /note="Description of Artificial Sequence: Synthetic oligonucleotide"
cacctcgttgccggagcagc

SEQ ID NO: 1495 - DNA, 20 bp, Artificial Sequence
  source: /note="Description of Artificial Sequence: Synthetic oligonucleotide"
acacctcgttgccggagcag

SEQ ID NO: 1496 - DNA, 20 bp, Artificial Sequence
  source: /note="Description of Artificial Sequence: Synthetic oligonucleotide"
tacacctcgttgccggagca

SEQ ID NO: 1497 - DNA, 20 bp, Artificial Sequence
  source: /note="Description of Artificial Sequence: Synthetic oligonucleotide"
gtacacctcgttgccggagc

SEQ ID NO: 1498 - DNA, 20 bp, Artificial Sequence
  source: /note="Description of Artificial Sequence: Synthetic oligonucleotide"
ggtacacctcgttgccggag

SEQ ID NO: 1499 - DNA, 20 bp, Artificial Sequence
  source: /note="Description of Artificial Sequence: Synthetic oligonucleotide"
tggtacacctcgttgccgga

SEQ ID NO: 1500 - DNA, 20 bp, Artificial Sequence
  source: /note="Description of Artificial Sequence: Synthetic oligonucleotide"
gtggtacacctcgttgccgg

SEQ ID NO: 1501 - DNA, 20 bp, Artificial Sequence
  source: /note="Description of Artificial Sequence: Synthetic oligonucleotide"
tgtggtacacctcgttgccg

SEQ ID NO: 1502 - DNA, 20 bp, Artificial Sequence
  source: /note="Description of Artificial Sequence: Synthetic oligonucleotide"
atgtggtacacctcgttgcc

SEQ ID NO: 1503 - DNA, 20 bp, Artificial Sequence
  source: /note="Description of Artificial Sequence: Synthetic oligonucleotide"
gatgtggtacacctcgttgc

SEQ ID NO: 1504 - DNA, 20 bp, Artificial Sequence
  source: /note="Description of Artificial Sequence: Synthetic oligonucleotide"
ggatgtggtacacctcgttg

SEQ ID NO: 1505 - DNA, 20 bp, Artificial Sequence
  source: /note="Description of Artificial Sequence: Synthetic oligonucleotide"
cggatgtggtacacctcgtt

SEQ ID NO: 1506 - DNA, 20 bp, Artificial Sequence
  source: /note="Description of Artificial Sequence: Synthetic oligonucleotide"
gcggatgtggtacacctcgt

SEQ ID NO: 1507 - DNA, 20 bp, Artificial Sequence
  source: /note="Description of Artificial Sequence: Synthetic oligonucleotide"
tgcggatgtggtacacctcg

SEQ ID NO: 1508 - DNA, 20 bp, Artificial Sequence
  source: /note="Description of Artificial Sequence: Synthetic oligonucleotide"
catgcggatgtggtacacct

SEQ ID NO: 1509 - DNA, 20 bp, Artificial Sequence
  source: /note="Description of Artificial Sequence: Synthetic oligonucleotide"
ccatgcggatgtggtacacc

SEQ ID NO: 1510 - DNA, 20 bp, Artificial Sequence
  source: /note="Description of Artificial Sequence: Synthetic oligonucleotide"
cccatgcggatgtggtacac

SEQ ID NO: 1511 - DNA, 20 bp, Artificial Sequence
  source: /note="Description of Artificial Sequence: Synthetic oligonucleotide"
acccatgcggatgtggtaca

SEQ ID NO: 1512 - DNA, 20 bp, Artificial Sequence
  source: /note="Description of Artificial Sequence: Synthetic oligonucleotide"
cacccatgcggatgtggtac

SEQ ID NO: 1513 - DNA, 20 bp, Artificial Sequence
  source: /note="Description of Artificial Sequence: Synthetic oligonucleotide"
tcacccatgcggatgtggta

SEQ ID NO: 1514 - DNA, 20 bp, Artificial Sequence
  source: /note="Description of Artificial Sequence: Synthetic oligonucleotide"
gtcacccatgcggatgtggt

SEQ ID NO: 1515 - DNA, 20 bp, Artificial Sequence
  source: /note="Description of Artificial Sequence: Synthetic oligonucleotide"
ctgtcacccatgcggatgtg

SEQ ID NO: 1516 - DNA, 20 bp, Artificial Sequence
  source: /note="Description of Artificial Sequence: Synthetic oligonucleotide"
gctgtcacccatgcggatgt

SEQ ID NO: 1517 - DNA, 20 bp, Artificial Sequence
  source: /note="Description of Artificial Sequence: Synthetic oligonucleotide"
tgctgtcacccatgcggatg

SEQ ID NO: 1518 - DNA, 20 bp, Artificial Sequence
  source: /note="Description of Artificial Sequence: Synthetic oligonucleotide"
ttgctgtcacccatgcggat

SEQ ID NO: 1519 - DNA, 20 bp, Artificial Sequence
  source: /note="Description of Artificial Sequence: Synthetic oligonucleotide"
cttgctgtcacccatgcgga

SEQ ID NO: 1520 - DNA, 20 bp, Artificial Sequence
  source: /note="Description of Artificial Sequence: Synthetic oligonucleotide"
acttgctgtcacccatgcgg

SEQ ID NO: 1521 - DNA, 20 bp, Artificial Sequence
  source: /note="Description of Artificial Sequence: Synthetic oligonucleotide"
aacttgctgtcacccatgcg

SEQ ID NO: 1522 - DNA, 20 bp, Artificial Sequence
  source: /note="Description of Artificial Sequence: Synthetic oligonucleotide"
gaacttgctgtcacccatgc

SEQ ID NO: 1523 - DNA, 20 bp, Artificial Sequence
  source: /note="Description of Artificial Sequence: Synthetic oligonucleotide"
agaacttgctgtcacccatg

SEQ ID NO: 1524 - DNA, 20 bp, Artificial Sequence
  source: /note="Description of Artificial Sequence: Synthetic oligonucleotide"
aagaacttgctgtcacccat

SEQ ID NO: 1525 - DNA, 20 bp, Artificial Sequence
  source: /note="Description of Artificial Sequence: Synthetic oligonucleotide"
gaagaacttgctgtcaccca

SEQ ID NO: 1526 - DNA, 20 bp, Artificial Sequence
  source: /note="Description of Artificial Sequence: Synthetic oligonucleotide"
ggaagaacttgctgtcaccc

SEQ ID NO: 1527 - DNA, 20 bp, Artificial Sequence
  source: /note="Description of Artificial Sequence: Synthetic oligonucleotide"
cggaagaacttgctgtcacc

SEQ ID NO: 1528 - DNA, 20 bp, Artificial Sequence
  source: /note="Description of Artificial Sequence: Synthetic oligonucleotide"
gcggaagaacttgctgtcac

SEQ ID NO: 1529 - DNA, 20 bp, Artificial Sequence
  source: /note="Description of Artificial Sequence: Synthetic oligonucleotide"
tcgcggaagaacttgctgtc

SEQ ID NO: 1530 - DNA, 20 bp, Artificial Sequence
  source: /note="Description of Artificial Sequence: Synthetic oligonucleotide"
ctcgcggaagaacttgctgt

SEQ ID NO: 1531 - DNA, 20 bp, Artificial Sequence
  source: /note="Description of Artificial Sequence: Synthetic oligonucleotide"
actcgcggaagaacttgctg

SEQ ID NO: 1532 - DNA, 20 bp, Artificial Sequence
  source: /note="Description of Artificial Sequence: Synthetic oligonucleotide"
tactcgcggaagaacttgct

SEQ ID NO: 1533 - DNA, 20 bp, Artificial Sequence
  source: /note="Description of Artificial Sequence: Synthetic oligonucleotide"
gtactcgcggaagaacttgc

SEQ ID NO: 1534 - DNA, 20 bp, Artificial Sequence
  source: /note="Description of Artificial Sequence: Synthetic oligonucleotide"
cgtactcgcggaagaacttg

SEQ ID NO: 1535 - DNA, 20 bp, Artificial Sequence
  source: /note="Description of Artificial Sequence: Synthetic oligonucleotide"
tcgtactcgcggaagaactt

SEQ ID NO: 1536 - DNA, 20 bp, Artificial Sequence
  source: /note="Description of Artificial Sequence: Synthetic oligonucleotide"
ctcgtactcgcggaagaact

SEQ ID NO: 1537 - DNA, 20 bp, Artificial Sequence
  source: /note="Description of Artificial Sequence: Synthetic oligonucleotide"
cctcgtactcgcggaagaac

SEQ ID NO: 1538 - DNA, 20 bp, Artificial Sequence
  source: /note="Description of Artificial Sequence: Synthetic oligonucleotide"
ccctcgtactcgcggaagaa

SEQ ID NO: 1539 - DNA, 20 bp, Artificial Sequence
  source: /note="Description of Artificial Sequence: Synthetic oligonucleotide"
gccctcgtactcgcggaaga

SEQ ID NO: 1540 - DNA, 20 bp, Artificial Sequence
  source: /note="Description of Artificial Sequence: Synthetic oligonucleotide"
tgccctcgtactcgcggaag

SEQ ID NO: 1541 - DNA, 20 bp, Artificial Sequence
  source: /note="Description of Artificial Sequence: Synthetic oligonucleotide"
ttgccctcgtactcgcggaa

SEQ ID NO: 1542 - DNA, 20 bp, Artificial Sequence
  source: /note="Description of Artificial Sequence: Synthetic oligonucleotide"
cttgccctcgtactcgcgga

SEQ ID NO: 1543 - DNA, 20 bp, Artificial Sequence
  source: /note="Description of Artificial Sequence: Synthetic oligonucleotide"
tcttgccctcgtactcgcgg

SEQ ID NO: 1544 - DNA, 20 bp, Artificial Sequence
  source: /note="Description of Artificial Sequence: Synthetic oligonucleotide"
ctcttgccctcgtactcgcg

SEQ ID NO: 1545 - DNA, 20 bp, Artificial Sequence
  source: /note="Description of Artificial Sequence: Synthetic oligonucleotide"
gctcttgccctcgtactcgc

SEQ ID NO: 1546 - DNA, 20 bp, Artificial Sequence
  source: /note="Description of Artificial Sequence: Synthetic oligonucleotide"
agctcttgccctcgtactcg

SEQ ID NO: 1547 - DNA, 20 bp, Artificial Sequence
  source: /note="Description of Artificial Sequence: Synthetic oligonucleotide"
aagctcttgccctcgtactc

SEQ ID NO: 1548 - DNA, 20 bp, Artificial Sequence
  source: /note="Description of Artificial Sequence: Synthetic oligonucleotide"
tgaagctcttgccctcgtac

SEQ ID NO: 1549 - DNA, 20 bp, Artificial Sequence
  source: /note="Description of Artificial Sequence: Synthetic oligonucleotide"
gtgaagctcttgccctcgta

SEQ ID NO: 1550 - DNA, 20 bp, Artificial Sequence
  source: /note="Description of Artificial Sequence: Synthetic oligonucleotide"
ggtgaagctcttgccctcgt

SEQ ID NO: 1551 - DNA, 20 bp, Artificial Sequence
  source: /note="Description of Artificial Sequence: Synthetic oligonucleotide"
aggtgaagctcttgccctcg

SEQ ID NO: 1552 - DNA, 20 bp, Artificial Sequence
  source: /note="Description of Artificial Sequence: Synthetic oligonucleotide"
taggtgaagctcttgccctc

SEQ ID NO: 1553 - DNA, 20 bp, Artificial Sequence
  source: /note="Description of Artificial Sequence: Synthetic oligonucleotide"
gtaggtgaagctcttgccct

SEQ ID NO: 1554 - DNA, 20 bp, Artificial Sequence
  source: /note="Description of Artificial Sequence: Synthetic oligonucleotide"
cgtaggtgaagctcttgccc

SEQ ID NO: 1555 - DNA, 20 bp, Artificial Sequence
  source: /note="Description of Artificial Sequence: Synthetic oligonucleotide"
gcgtaggtgaagctcttgcc

SEQ ID NO: 1556 - DNA, 20 bp, Artificial Sequence
  source: /note="Description of Artificial Sequence: Synthetic oligonucleotide"
cgcgtaggtgaagctcttgc

SEQ ID NO: 1557 - DNA, 20 bp, Artificial Sequence
  source: /note="Description of Artificial Sequence: Synthetic oligonucleotide"
ccgcgtaggtgaagctcttg

SEQ ID NO: 1558 - DNA, 20 bp, Artificial Sequence
  source: /note="Description of Artificial Sequence: Synthetic oligonucleotide"
gccgcgtaggtgaagctctt

SEQ ID NO: 1559 - DNA, 20 bp, Artificial Sequence
  source: /note="Description of Artificial Sequence: Synthetic oligonucleotide"
ggccgcgtaggtgaagctct

SEQ ID NO: 1560 - DNA, 20 bp, Artificial Sequence
  source: /note="Description of Artificial Sequence: Synthetic oligonucleotide"
aggccgcgtaggtgaagctc

SEQ ID NO: 1561 - DNA, 20 bp, Artificial Sequence
  source: /note="Description of Artificial Sequence: Synthetic oligonucleotide"
aaggccgcgtaggtgaagct

SEQ ID NO: 1562 - DNA, 20 bp, Artificial Sequence
  source: /note="Description of Artificial Sequence: Synthetic oligonucleotide"
gaaggccgcgtaggtgaagc

SEQ ID NO: 1563 - DNA, 20 bp, Artificial Sequence
  source: /note="Description of Artificial Sequence: Synthetic oligonucleotide"
ggaaggccgcgtaggtgaag

SEQ ID NO: 1564 - DNA, 20 bp, Artificial Sequence
  source: /note="Description of Artificial Sequence: Synthetic oligonucleotide"
tggaaggccgcgtaggtgaa

SEQ ID NO: 1565 - DNA, 20 bp, Artificial Sequence
  source: /note="Description of Artificial Sequence: Synthetic oligonucleotide"
gtggaaggccgcgtaggtga

SEQ ID NO: 1566 - DNA, 20 bp, Artificial Sequence
  source: /note="Description of Artificial Sequence: Synthetic oligonucleotide"
cgtggaaggccgcgtaggtg

SEQ ID NO: 1567 - DNA, 20 bp, Artificial Sequence
  source: /note="Description of Artificial Sequence: Synthetic oligonucleotide"
gcgtggaaggccgcgtaggt

SEQ ID NO: 1568 - DNA, 20 bp, Artificial Sequence
  source: /note="Description of Artificial Sequence: Synthetic oligonucleotide"
ggcgtggaaggccgcgtagg

SEQ ID NO: 1569 - DNA, 20 bp, Artificial Sequence
  source: /note="Description of Artificial Sequence: Synthetic oligonucleotide"
gggcgtggaaggccgcgtag

SEQ ID NO: 1570 - DNA, 20 bp, Artificial Sequence
  source: /note="Description of Artificial Sequence: Synthetic oligonucleotide"
tgggcgtggaaggccgcgta

SEQ ID NO: 1571 - DNA, 20 bp, Artificial Sequence
  source: /note="Description of Artificial Sequence: Synthetic oligonucleotide"
gtgggcgtggaaggccgcgt

SEQ ID NO: 1572 - DNA, 20 bp, Artificial Sequence
  source: /note="Description of Artificial Sequence: Synthetic oligonucleotide"
tgtgggcgtggaaggccgcg

SEQ ID NO: 1573 - DNA, 20 bp, Artificial Sequence
  source: /note="Description of Artificial Sequence: Synthetic oligonucleotide"
ttgtgggcgtggaaggccgc

SEQ ID NO: 1574 - DNA, 20 bp, Artificial Sequence
  source: /note="Description of Artificial Sequence: Synthetic oligonucleotide"
cttgtgggcgtggaaggccg

SEQ ID NO: 1575 - DNA, 20 bp, Artificial Sequence
  source: /note="Description of Artificial Sequence: Synthetic oligonucleotide"
tcttgtgggcgtggaaggcc

SEQ ID NO: 1576 - DNA, 20 bp, Artificial Sequence
  source: /note="Description of Artificial Sequence: Synthetic oligonucleotide"
ttcttgtgggcgtggaaggc

SEQ ID NO: 1577 - DNA, 20 bp, Artificial Sequence
  source: /note="Description of Artificial Sequence: Synthetic oligonucleotide"
cttcttgtgggcgtggaagg

SEQ ID NO: 1578 - DNA, 20 bp, Artificial Sequence
  source: /note="Description of Artificial Sequence: Synthetic oligonucleotide"
tacttcttgtgggcgtggaa

SEQ ID NO: 1579 - DNA, 20 bp, Artificial Sequence
  source: /note="Description of Artificial Sequence: Synthetic oligonucleotide"
atacttcttgtgggcgtgga

SEQ ID NO: 1580 - DNA, 20 bp, Artificial Sequence
  source: /note="Description of Artificial Sequence: Synthetic oligonucleotide"
catacttcttgtgggcgtgg

SEQ ID NO: 1581 - DNA, 20 bp, Artificial Sequence
  source: /note="Description of Artificial Sequence: Synthetic oligonucleotide"
ccatacttcttgtgggcgtg

SEQ ID NO: 1582 - DNA, 20 bp, Artificial Sequence
  source: /note="Description of Artificial Sequence: Synthetic oligonucleotide"
gccatacttcttgtgggcgt

SEQ ID NO: 1583 - DNA, 20 bp, Artificial Sequence
  source: /note="Description of Artificial Sequence: Synthetic oligonucleotide"
cgccatacttcttgtgggcg

SEQ ID NO: 1584 - DNA, 20 bp, Artificial Sequence
  source: /note="Description of Artificial Sequence: Synthetic oligonucleotide"
acgccatacttcttgtgggc

SEQ ID NO: 1585 - DNA, 20 bp, Artificial Sequence
  source: /note="Description of Artificial Sequence: Synthetic oligonucleotide"
cacgccatacttcttgtggg

SEQ ID NO: 1586 - DNA, 20 bp, Artificial Sequence
  source: /note="Description of Artificial Sequence: Synthetic oligonucleotide"
acacgccatacttcttgtgg

SEQ ID NO: 1587 - DNA, 20 bp, Artificial Sequence
  source: /note="Description of Artificial Sequence: Synthetic oligonucleotide"
cacacgccatacttcttgtg

SEQ ID NO: 1588 - DNA, 20 bp, Artificial Sequence
  source: /note="Description of Artificial Sequence: Synthetic oligonucleotide"
gcacacgccatacttcttgt

SEQ ID NO: 1589 - DNA, 20 bp, Artificial Sequence
  source: /note="Description of Artificial Sequence: Synthetic oligonucleotide"
ggcacacgccatacttcttg

SEQ ID NO: 1590 - DNA, 20 bp, Artificial Sequence
  source: /note="Description of Artificial Sequence: Synthetic oligonucleotide"
aggcacacgccatacttctt

SEQ ID NO: 1591 - DNA, 20 bp, Artificial Sequence
  source: /note="Description of Artificial Sequence: Synthetic oligonucleotide"
gaggcacacgccatacttct

SEQ ID NO: 1592 - DNA, 20 bp, Artificial Sequence
  source: /note="Description of Artificial Sequence: Synthetic oligonucleotide"
tgaggcacacgccatacttc

SEQ ID NO: 1593 - DNA, 20 bp, Artificial Sequence
  source: /note="Description of Artificial Sequence: Synthetic oligonucleotide"
atgaggcacacgccatactt

SEQ ID NO: 1594 - DNA, 20 bp, Artificial Sequence
  source: /note="Description of Artificial Sequence: Synthetic oligonucleotide"
gatgaggcacacgccatact

SEQ ID NO: 1595 - DNA, 20 bp, Artificial Sequence
  source: /note="Description of Artificial Sequence: Synthetic oligonucleotide"
cgatgaggcacacgccatac

SEQ ID NO: 1596 - DNA, 20 bp, Artificial Sequence
  source: /note="Description of Artificial Sequence: Synthetic oligonucleotide"
ccgatgaggcacacgccata

SEQ ID NO: 1597 - DNA, 20 bp, Artificial Sequence
  source: /note="Description of Artificial Sequence: Synthetic oligonucleotide"
cccgatgaggcacacgccat

SEQ ID NO: 1598 - DNA, 20 bp, Artificial Sequence
  source: /note="Description of Artificial Sequence: Synthetic oligonucleotide"
gcccgatgaggcacacgcca

SEQ ID NO: 1599 - DNA, 20 bp, Artificial Sequence
  source: /note="Description of Artificial Sequence: Synthetic oligonucleotide"
agcccgatgaggcacacgcc

SEQ ID NO: 1600 - DNA, 20 bp, Artificial Sequence
  source: /note="Description of Artificial Sequence: Synthetic oligonucleotide"
cagcccgatgaggcacacgc

SEQ ID NO: 1601 - DNA, 20 bp, Artificial Sequence
  source: /note="Description of Artificial Sequence: Synthetic oligonucleotide"
tcagcccgatgaggcacacg

SEQ ID NO: 1602 - DNA, 20 bp, Artificial Sequence
  source: /note="Description of Artificial Sequence: Synthetic oligonucleotide"
ttcagcccgatgaggcacac

SEQ ID NO: 1603 - DNA, 20 bp, Artificial Sequence
  source: /note="Description of Artificial Sequence: Synthetic oligonucleotide"
cttcagcccgatgaggcaca

SEQ ID NO: 1604 - DNA, 20 bp, Artificial Sequence
  source: /note="Description of Artificial Sequence: Synthetic oligonucleotide"
gcttcagcccgatgaggcac

SEQ ID NO: 1605 - DNA, 20 bp, Artificial Sequence
  source: /note="Description of Artificial Sequence: Synthetic oligonucleotide"
cgcttcagcccgatgaggca

SEQ ID NO: 1606 - DNA, 20 bp, Artificial Sequence
  source: /note="Description of Artificial Sequence: Synthetic oligonucleotide"
ccgcttcagcccgatgaggc

SEQ ID NO: 1607 - DNA, 20 bp, Artificial Sequence
  source: /note="Description of Artificial Sequence: Synthetic oligonucleotide"
cccgcttcagcccgatgagg

SEQ ID NO: 1608 - DNA, 20 bp, Artificial Sequence
  source: /note="Description of Artificial Sequence: Synthetic oligonucleotide"
tcccgcttcagcccgatgag

SEQ ID NO: 1609 - DNA, 20 bp, Artificial Sequence
  source: /note="Description of Artificial Sequence: Synthetic oligonucleotide"
ctcccgcttcagcccgatga

SEQ ID NO: 1610 - DNA, 20 bp, Artificial Sequence
  source: /note="Description of Artificial Sequence: Synthetic oligonucleotide"
cctcccgcttcagcccgatg

SEQ ID NO: 1611 - DNA, 20 bp, Artificial Sequence
  source: /note="Description of Artificial Sequence: Synthetic oligonucleotide"
tcctcccgcttcagcccgat

SEQ ID NO: 1612 - DNA, 20 bp, Artificial Sequence
  source: /note="Description of Artificial Sequence: Synthetic oligonucleotide"
gtcctcccgcttcagcccga

SEQ ID NO: 1613 - DNA, 20 bp, Artificial Sequence
  source: /note="Description of Artificial Sequence: Synthetic oligonucleotide"
tgtcctcccgcttcagcccg

SEQ ID NO: 1614 - DNA, 20 bp, Artificial Sequence
  source: /note="Description of Artificial Sequence: Synthetic oligonucleotide"
ttgtcctcccgcttcagccc

SEQ ID NO: 1615 - DNA, 20 bp, Artificial Sequence
  source: /note="Description of Artificial Sequence: Synthetic oligonucleotide"
tgttgtcctcccgcttcagc

SEQ ID NO: 1616 - DNA, 20 bp, Artificial Sequence
  source: /note="Description of Artificial Sequence: Synthetic oligonucleotide"
ttgttgtcctcccgcttcag

SEQ ID NO: 1617 - DNA, 20 bp, Artificial Sequence
  source: /note="Description of Artificial Sequence: Synthetic oligonucleotide"
cttgttgtcctcccgcttca

SEQ ID NO: 1618 - DNA, 20 bp, Artificial Sequence
  source: /note="Description of Artificial Sequence: Synthetic oligonucleotide"
tcttgttgtcctcccgcttc

SEQ ID NO: 1619 - DNA, 20 bp, Artificial Sequence
  source: /note="Description of Artificial Sequence: Synthetic oligonucleotide"
ctcttgttgtcctcccgctt

SEQ ID NO: 1620 - DNA, 20 bp, Artificial Sequence
  source: /note="Description of Artificial Sequence: Synthetic oligonucleotide"
gctcttgttgtcctcccgct

SEQ ID NO: 1621 - DNA, 20 bp, Artificial Sequence
  source: /note="Description of Artificial Sequence: Synthetic oligonucleotide"
tgctcttgttgtcctcccgc

SEQ ID NO: 1622 - DNA, 20 bp, Artificial Sequence
  source: /note="Description of Artificial Sequence: Synthetic oligonucleotide"
atgctcttgttgtcctcccg

SEQ ID NO: 1623 - DNA, 20 bp, Artificial Sequence
  source: /note="Description of Artificial Sequence: Synthetic oligonucleotide"
gatgctcttgttgtcctccc

SEQ ID NO: 1624 - DNA, 20 bp, Artificial Sequence
  source: /note="Description of Artificial Sequence: Synthetic oligonucleotide"
ggatgctcttgttgtcctcc

SEQ ID NO: 1625 - DNA, 20 bp, Artificial Sequence
  source: /note="Description of Artificial Sequence: Synthetic oligonucleotide"
aggatgctcttgttgtcctc

SEQ ID NO: 1626 - DNA, 20 bp, Artificial Sequence
  source: /note="Description of Artificial Sequence: Synthetic oligonucleotide"
caggatgctcttgttgtcct

SEQ ID NO: 1627 - DNA, 20 bp, Artificial Sequence
  source: /note="Description of Artificial Sequence: Synthetic oligonucleotide"
gcaggatgctcttgttgtcc

SEQ ID NO: 1628 - DNA, 20 bp, Artificial Sequence
  source: /note="Description of Artificial Sequence: Synthetic oligonucleotide"
agcaggatgctcttgttgtc

SEQ ID NO: 1629 - DNA, 20 bp, Artificial Sequence
  source: /note="Description of Artificial Sequence: Synthetic oligonucleotide"
tcagcaggatgctcttgttg

SEQ ID NO: 1630 - DNA, 20 bp, Artificial Sequence
  source: /note="Description of Artificial Sequence: Synthetic oligonucleotide"
ttcagcaggatgctcttgtt

SEQ ID NO: 1631 - DNA, 20 bp, Artificial Sequence
  source: /note="Description of Artificial Sequence: Synthetic oligonucleotide"
gttcagcaggatgctcttgt

SEQ ID NO: 1632 - DNA, 20 bp, Artificial Sequence
  source: /note="Description of Artificial Sequence: Synthetic oligonucleotide"
ggttcagcaggatgctcttg

SEQ ID NO: 1633 - DNA, 20 bp, Artificial Sequence
  source: /note="Description of Artificial Sequence: Synthetic oligonucleotide"
gggttcagcaggatgctctt

SEQ ID NO: 1634 - DNA, 20 bp, Artificial Sequence
  source: /note="Description of Artificial Sequence: Synthetic oligonucleotide"
cgggttcagcaggatgctct

SEQ ID NO: 1635 - DNA, 20 bp, Artificial Sequence
  source: /note="Description of Artificial Sequence: Synthetic oligonucleotide"
ccgggttcagcaggatgctc

SEQ ID NO: 1636 - DNA, 20 bp, Artificial Sequence
  source: /note="Description of Artificial Sequence: Synthetic oligonucleotide"
aggcggccaggatgtgccgg

SEQ ID NO: 1637 - DNA, 20 bp, Artificial Sequence
  source: /note="Description of Artificial Sequence: Synthetic oligonucleotide"
gaggcggccaggatgtgccg

SEQ ID NO: 1638 - DNA, 20 bp, Artificial Sequence
  source: /note="Description of Artificial Sequence: Synthetic oligonucleotide"
agaggcggccaggatgtgcc

SEQ ID NO: 1639 - DNA, 20 bp, Artificial Sequence
  source: /note="Description of Artificial Sequence: Synthetic oligonucleotide"
cagaggcggccaggatgtgc

SEQ ID NO: 1640 - DNA, 20 bp, Artificial Sequence
  source: /note="Description of Artificial Sequence: Synthetic oligonucleotide"
tcagaggcggccaggatgtg

SEQ ID NO: 1641 - DNA, 20 bp, Artificial Sequence
  source: /note="Description of Artificial Sequence: Synthetic oligonucleotide"
gtcagaggcggccaggatgt

SEQ ID NO: 1642 - DNA, 20 bp, Artificial Sequence
  source: /note="Description of Artificial Sequence: Synthetic oligonucleotide"
tgtcagaggcggccaggatg

SEQ ID NO: 1643 - DNA, 20 bp, Artificial Sequence
  source: /note="Description of Artificial Sequence: Synthetic oligonucleotide"
gtgtcagaggcggccaggat

SEQ ID NO: 1644 - DNA, 20 bp, Artificial Sequence
  source: /note="Description of Artificial Sequence: Synthetic oligonucleotide"
ggtgtcagaggcggccagga

SEQ ID NO: 1645 - DNA, 20 bp, Artificial Sequence
  source: /note="Description of Artificial Sequence: Synthetic oligonucleotide"
aggtgtcagaggcggccagg

SEQ ID NO: 1646 - DNA, 20 bp, Artificial Sequence
  source: /note="Description of Artificial Sequence: Synthetic oligonucleotide"
caggtgtcagaggcggccag

SEQ ID NO: 1647 - DNA, 20 bp, Artificial Sequence
  source: /note="Description of Artificial Sequence: Synthetic oligonucleotide"
gcaggtgtcagaggcggcca

SEQ ID NO: 1648 - DNA, 20 bp, Artificial Sequence
  source: /note="Description of Artificial Sequence: Synthetic oligonucleotide"
agcaggtgtcagaggcggcc

SEQ ID NO: 1649 - DNA, 20 bp, Artificial Sequence
  source: /note="Description of Artificial Sequence: Synthetic oligonucleotide"
aagcaggtgtcagaggcggc

SEQ ID NO: 1650 - DNA, 20 bp, Artificial Sequence
  source: /note="Description of Artificial Sequence: Synthetic oligonucleotide"
gaagcaggtgtcagaggcgg

SEQ ID NO: 1651 - DNA, 20 bp, Artificial Sequence
  source: /note="Description of Artificial Sequence: Synthetic oligonucleotide"
agaagcaggtgtcagaggcg

SEQ ID NO: 1652 - DNA, 20 bp, Artificial Sequence
  source: /note="Description of Artificial Sequence: Synthetic oligonucleotide"
tagaagcaggtgtcagaggc

SEQ ID NO: 1653 - DNA, 20 bp, Artificial Sequence
  source: /note="Description of Artificial Sequence: Synthetic oligonucleotide"
gtagaagcaggtgtcagagg

SEQ ID NO: 1654 - DNA, 20 bp, Artificial Sequence
  source: /note="Description of Artificial Sequence: Synthetic oligonucleotide"
tgtagaagcaggtgtcagag

SEQ ID NO: 1655 - DNA, 20 bp, Artificial Sequence
  source: /note="Description of Artificial Sequence: Synthetic oligonucleotide"
atgtagaagcaggtgtcaga

SEQ ID NO: 1656 - DNA, 20 bp, Artificial Sequence
  source: /note="Description of Artificial Sequence: Synthetic oligonucleotide"
gatgtagaagcaggtgtcag

SEQ ID NO: 1657 - DNA, 20 bp, Artificial Sequence
  source: /note="Description of Artificial Sequence: Synthetic oligonucleotide"
tgatgtagaagcaggtgtca

SEQ ID NO: 1658 - DNA, 20 bp, Artificial Sequence
  source: /note="Description of Artificial Sequence: Synthetic oligonucleotide"
ttgatgtagaagcaggtgtc

SEQ ID NO: 1659 - DNA, 20 bp, Artificial Sequence
  source: /note="Description of Artificial Sequence: Synthetic oligonucleotide"
tgttgatgtagaagcaggtg

SEQ ID NO: 1660 - DNA, 20 bp, Artificial Sequence
  source: /note="Description of Artificial Sequence: Synthetic oligonucleotide"
atgttgatgtagaagcaggt

SEQ ID NO: 1661 - DNA, 20 bp, Artificial Sequence
  source: /note="Description of Artificial Sequence: Synthetic oligonucleotide"
gatgttgatgtagaagcagg

SEQ ID NO: 1662 - DNA, 20 bp, Artificial Sequence
  source: /note="Description of Artificial Sequence: Synthetic oligonucleotide"
tgatgttgatgtagaagcag

SEQ ID NO: 1663 - DNA, 20 bp, Artificial Sequence
  source: /note="Description of Artificial Sequence: Synthetic oligonucleotide"
gtgatgttgatgtagaagca

SEQ ID NO: 1664 - DNA, 20 bp, Artificial Sequence
  source: /note="Description of Artificial Sequence: Synthetic oligonucleotide"
ggtgatgttgatgtagaagc

SEQ ID NO: 1665 - DNA, 20 bp, Artificial Sequence
  source: /note="Description of Artificial Sequence: Synthetic oligonucleotide"
tggtgatgttgatgtagaag

SEQ ID NO: 1666 - DNA, 20 bp, Artificial Sequence
  source: /note="Description of Artificial Sequence: Synthetic oligonucleotide"
ttggtgatgttgatgtagaa

SEQ ID NO: 1667 - DNA, 20 bp, Artificial Sequence
  source: /note="Description of Artificial Sequence: Synthetic oligonucleotide"
cttggtgatgttgatgtaga

SEQ ID NO: 1668 - DNA, 20 bp, Artificial Sequence
  source: /note="Description of Artificial Sequence: Synthetic oligonucleotide"
ccttggtgatgttgatgtag

SEQ ID NO: 1669 - DNA, 20 bp, Artificial Sequence
  source: /note="Description of Artificial Sequence: Synthetic oligonucleotide"
tccttggtgatgttgatgta

SEQ ID NO: 1670 - DNA, 20 bp, Artificial Sequence
  source: /note="Description of Artificial Sequence: Synthetic oligonucleotide"
ctccttggtgatgttgatgt

SEQ ID NO: 1671 - DNA, 20 bp, Artificial Sequence
  source: /note="Description of Artificial Sequence: Synthetic oligonucleotide"
cctccttggtgatgttgatg

SEQ ID NO: 1672 - DNA, 20 bp, Artificial Sequence
  source: /note="Description of Artificial Sequence: Synthetic oligonucleotide"
tcctccttggtgatgttgat

SEQ ID NO: 1673 - DNA, 20 bp, Artificial Sequence
  source: /note="Description of Artificial Sequence: Synthetic oligonucleotide"
ctcctccttggtgatgttga

SEQ ID NO: 1674 - DNA, 20 bp, Artificial Sequence
  source: /note="Description of Artificial Sequence: Synthetic oligonucleotide"
tctcctccttggtgatgttg

SEQ ID NO: 1675 - DNA, 20 bp, Artificial Sequence
  source: /note="Description of Artificial Sequence: Synthetic oligonucleotide"
ttctcctccttggtgatgtt

SEQ ID NO: 1676 - DNA, 20 bp, Artificial Sequence
  source: /note="Description of Artificial Sequence: Synthetic oligonucleotide"
gttctcctccttggtgatgt

SEQ ID NO: 1677 - DNA, 20 bp, Artificial Sequence
  source: /note="Description of Artificial Sequence: Synthetic oligonucleotide"
agttctcctccttggtgatg

SEQ ID NO: 1678 - DNA, 20 bp, Artificial Sequence
  source: /note="Description of Artificial Sequence: Synthetic oligonucleotide"
gagttctcctccttggtgat

SEQ ID NO: 1679 - DNA, 20 bp, Artificial Sequence
  source: /note="Description of Artificial Sequence: Synthetic oligonucleotide"
ccgagttctcctccttggtg

SEQ ID NO: 1680 - DNA, 20 bp, Artificial Sequence
  source: /note="Description of Artificial Sequence: Synthetic oligonucleotide"
gccgagttctcctccttggt

SEQ ID NO: 1681 - DNA, 20 bp, Artificial Sequence
  source: /note="Description of Artificial Sequence: Synthetic oligonucleotide"
ggccgagttctcctccttgg

SEQ ID NO: 1682 - DNA, 20 bp, Artificial Sequence
  source: /note="Description of Artificial Sequence: Synthetic oligonucleotide"
aggccgagttctcctccttg

SEQ ID NO: 1683 - DNA, 20 bp, Artificial Sequence
  source: /note="Description of Artificial Sequence: Synthetic oligonucleotide"
aaggccgagttctcctcctt

SEQ ID NO: 1684 - DNA, 20 bp, Artificial Sequence
  source: /note="Description of Artificial Sequence: Synthetic oligonucleotide"
gaaggccgagttctcctcct

SEQ ID NO: 1685 - DNA, 20 bp, Artificial Sequence
  source: /note="Description of Artificial Sequence: Synthetic oligonucleotide"
tgaaggccgagttctcctcc

SEQ ID NO: 1686 - DNA, 20 bp, Artificial Sequence
  source: /note="Description of Artificial Sequence: Synthetic oligonucleotide"
atgaaggccgagttctcctc

SEQ ID NO: 1687 - DNA, 20 bp, Artificial Sequence
  source: /note="Description of Artificial Sequence: Synthetic oligonucleotide"
gatgaaggccgagttctcct

SEQ ID NO: 1688 - DNA, 20 bp, Artificial Sequence
  source: /note="Description of Artificial Sequence: Synthetic oligonucleotide"
agatgaaggccgagttctcc

SEQ ID NO: 1689 - DNA, 20 bp, Artificial Sequence
  source: /note="Description of Artificial Sequence: Synthetic oligonucleotide"
aagatgaaggccgagttctc

SEQ ID NO: 1690 - DNA, 20 bp, Artificial Sequence
  source: /note="Description of Artificial Sequence: Synthetic oligonucleotide"
gaagatgaaggccgagttct

SEQ ID NO: 1691 - DNA, 20 bp, Artificial Sequence
  source: /note="Description of Artificial Sequence: Synthetic oligonucleotide"
tgaagatgaaggccgagttc

SEQ ID NO: 1692 - DNA, 20 bp, Artificial Sequence
  source: /note="Description of Artificial Sequence: Synthetic oligonucleotide"
ttgaagatgaaggccgagtt

SEQ ID NO: 1693 - DNA, 20 bp, Artificial Sequence
  source: /note="Description of Artificial Sequence: Synthetic oligonucleotide"
cttgaagatgaaggccgagt

SEQ ID NO: 1694 - DNA, 20 bp, Artificial Sequence
  source: /note="Description of Artificial Sequence: Synthetic oligonucleotide"
gcttgaagatgaaggccgag

SEQ ID NO: 1695 - DNA, 20 bp, Artificial Sequence
  source: /note="Description of Artificial Sequence: Synthetic oligonucleotide"
tgcttgaagatgaaggccga

SEQ ID NO: 1696 - DNA, 20 bp, Artificial Sequence
  source: /note="Description of Artificial Sequence: Synthetic oligonucleotide"
ctgcttgaagatgaaggccg

SEQ ID NO: 1697 - DNA, 20 bp, Artificial Sequence
  source: /note="Description of Artificial Sequence: Synthetic oligonucleotide"
cctgcttgaagatgaaggcc

SEQ ID NO: 1698 - DNA, 20 bp, Artificial Sequence
  source: /note="Description of Artificial Sequence: Synthetic oligonucleotide"
tcctgcttgaagatgaaggc

SEQ ID NO: 1699 - DNA, 20 bp, Artificial Sequence
  source: /note="Description of Artificial Sequence: Synthetic oligonucleotide"
ctcctgcttgaagatgaagg

SEQ ID NO: 1700 - DNA, 20 bp, Artificial Sequence
  source: /note="Description of Artificial Sequence: Synthetic oligonucleotide"
cctcctgcttgaagatgaag

SEQ ID NO: 1701 - DNA, 20 bp, Artificial Sequence
  source: /note="Description of Artificial Sequence: Synthetic oligonucleotide"
tcctcctgcttgaagatgaa

SEQ ID NO: 1702 - DNA, 20 bp, Artificial Sequence
  source: /note="Description of Artificial Sequence: Synthetic oligonucleotide"
ctcctcctgcttgaagatga

SEQ ID NO: 1703 - DNA, 20 bp, Artificial Sequence
  source: /note="Description of Artificial Sequence: Synthetic oligonucleotide"
tctcctcctgcttgaagatg

SEQ ID NO: 1704 - DNA, 20 bp, Artificial Sequence
  source: /note="Description of Artificial Sequence: Synthetic oligonucleotide"
ttctcctcctgcttgaagat

SEQ ID NO: 1705 - DNA, 20 bp, Artificial Sequence
  source: /note="Description of Artificial Sequence: Synthetic oligonucleotide"
cttctcctcctgcttgaaga

SEQ ID NO: 1706 - DNA, 20 bp, Artificial Sequence
  source: /note="Description of Artificial Sequence: Synthetic oligonucleotide"
gcttctcctcctgcttgaag

SEQ ID NO: 1707 - DNA, 20 bp, Artificial Sequence
  source: /note="Description of Artificial Sequence: Synthetic oligonucleotide"
ccgcttctcctcctgcttga

SEQ ID NO: 1708 - DNA, 20 bp, Artificial Sequence
  source: /note="Description of Artificial Sequence: Synthetic oligonucleotide"
tccgcttctcctcctgcttg

SEQ ID NO: 1709 - DNA, 20 bp, Artificial Sequence
  source: /note="Description of Artificial Sequence: Synthetic oligonucleotide"
ttccgcttctcctcctgctt

SEQ ID NO: 1710 - DNA, 20 bp, Artificial Sequence
  source: /note="Description of Artificial Sequence: Synthetic oligonucleotide"
cttccgcttctcctcctgct

SEQ ID NO: 1711 - DNA, 20 bp, Artificial Sequence
  source: /note="Description of Artificial Sequence: Synthetic oligonucleotide"
ttcttccgcttctcctcctg

SEQ ID NO: 1712 - DNA, 20 bp, Artificial Sequence
  source: /note="Description of Artificial Sequence: Synthetic oligonucleotide"
cttcttccgcttctcctcct

SEQ ID NO: 1713 - DNA, 20 bp, Artificial Sequence
  source: /note="Description of Artificial Sequence: Synthetic oligonucleotide"
tcttcttccgcttctcctcc

SEQ ID NO: 1714 - DNA, 20 bp, Artificial Sequence
  source: /note="Description of Artificial Sequence: Synthetic oligonucleotide"
ctcttcttccgcttctcctc

SEQ ID NO: 1715 - DNA, 20 bp, Artificial Sequence
  source: /note="Description of Artificial Sequence: Synthetic oligonucleotide"
cctcttcttccgcttctcct

SEQ ID NO: 1716 - DNA, 20 bp, Artificial Sequence
  source: /note="Description of Artificial Sequence: Synthetic oligonucleotide"
ccctcttcttccgcttctcc

SEQ ID NO: 1717 - DNA, 20 bp, Artificial Sequence
  source: /note="Description of Artificial Sequence: Synthetic oligonucleotide"
gccctcttcttccgcttctc

SEQ ID NO: 1718 - DNA, 20 bp, Artificial Sequence
  source: /note="Description of Artificial Sequence: Synthetic oligonucleotide"
ggccctcttcttccgcttct

SEQ ID NO: 1719 - DNA, 20 bp, Artificial Sequence
  source: /note="Description of Artificial Sequence: Synthetic oligonucleotide"
aggccctcttcttccgcttc

SEQ ID NO: 1720 - DNA, 20 bp, Artificial Sequence
  source: /note="Description of Artificial Sequence: Synthetic oligonucleotide"
aaggccctcttcttccgctt

SEQ ID NO: 1721 - DNA, 20 bp, Artificial Sequence
  source: /note="Description of Artificial Sequence: Synthetic oligonucleotide"
gaaggccctcttcttccgct

SEQ ID NO: 1722 - DNA, 20 bp, Artificial Sequence
  source: /note="Description of Artificial Sequence: Synthetic oligonucleotide"
agaaggccctcttcttccgc

SEQ ID NO: 1723 - DNA, 20 bp, Artificial Sequence
  source: /note="Description of Artificial Sequence: Synthetic oligonucleotide"
gagaaggccctcttcttccg

SEQ ID NO: 1724 - DNA, 20 bp, Artificial Sequence
  source: /note="Description of Artificial Sequence: Synthetic oligonucleotide"
cgagaaggccctcttcttcc

SEQ ID NO: 1725 - DNA, 20 bp, Artificial Sequence
  source: /note="Description of Artificial Sequence: Synthetic oligonucleotide"
ccgagaaggccctcttcttc

SEQ ID NO: 1726 - DNA, 20 bp, Artificial Sequence
  source: /note="Description of Artificial Sequence: Synthetic oligonucleotide"
cccgagaaggccctcttctt

SEQ ID NO: 1727 - DNA, 20 bp, Artificial Sequence
  source: /note="Description of Artificial Sequence: Synthetic oligonucleotide"
ccccgagaaggccctcttct

SEQ ID NO: 1728 - DNA, 20 bp, Artificial Sequence
  source: /note="Description of Artificial Sequence: Synthetic oligonucleotide"
gccccgagaaggccctcttc

SEQ ID NO: 1729 - DNA, 20 bp, Artificial Sequence
  source: /note="Description of Artificial Sequence: Synthetic oligonucleotide"
tgccccgagaaggccctctt

SEQ ID NO: 1730 - DNA, 20 bp, Artificial Sequence
  source: /note="Description of Artificial Sequence: Synthetic oligonucleotide"
ctgccccgagaaggccctct

SEQ ID NO: 1731 - DNA, 20 bp, Artificial Sequence
  source: /note="Description of Artificial Sequence: Synthetic oligonucleotide"
cctgccccgagaaggccctc

SEQ ID NO: 1732 - DNA, 20 bp, Artificial Sequence
  source: /note="Description of Artificial Sequence: Synthetic oligonucleotide"
ccctgccccgagaaggccct

SEQ ID NO: 1733 - DNA, 20 bp, Artificial Sequence
  source: /note="Description of Artificial Sequence: Synthetic oligonucleotide"
agcccctgccccgagaaggc

SEQ ID NO: 1734 - DNA, 20 bp, Artificial Sequence
  source: /note="Description of Artificial Sequence: Synthetic oligonucleotide"
cagcccctgccccgagaagg

SEQ ID NO: 1735 - DNA, 20 bp, Artificial Sequence
  source: /note="Description of Artificial Sequence: Synthetic oligonucleotide"
gcagcccctgccccgagaag

SEQ ID NO: 1736 - DNA, 20 bp, Artificial Sequence
  source: /note="Description of Artificial Sequence: Synthetic oligonucleotide"
tgcagcccctgccccgagaa

SEQ ID NO: 1737 - DNA, 20 bp, Artificial Sequence
  source: /note="Description of Artificial Sequence: Synthetic oligonucleotide"
gtgcagcccctgccccgaga

SEQ ID NO: 1738 - DNA, 20 bp, Artificial Sequence
  source: /note="Description of Artificial Sequence: Synthetic oligonucleotide"
tcgtgcagcccctgccccga

SEQ ID NO: 1739 - DNA, 20 bp, Artificial Sequence
  source: /note="Description of Artificial Sequence: Synthetic oligonucleotide"
accctcgtgcagcccctgcc

SEQ ID NO: 1740 - DNA, 20 bp, Artificial Sequence
  source: /note="Description of Artificial Sequence: Synthetic oligonucleotide"
gaccctcgtgcagcccctgc

SEQ ID NO: 1741 - DNA, 20 bp, Artificial Sequence
  source: /note="Description of Artificial Sequence: Synthetic oligonucleotide"
ggaccctcgtgcagcccctg

SEQ ID NO: 1742 - DNA, 20 bp, Artificial Sequence
  source: /note="Description of Artificial Sequence: Synthetic oligonucleotide"
tgctgtgcacgggcaggcgg

SEQ ID NO: 1743 - DNA, 20 bp, Artificial Sequence
  source: /note="Description of Artificial Sequence: Synthetic oligonucleotide"
atgctgtgcacgggcaggcg

SEQ ID NO: 1744 - DNA, 20 bp, Artificial Sequence
  source: /note="Description of Artificial Sequence: Synthetic oligonucleotide"
gatgctgtgcacgggcaggc

SEQ ID NO: 1745 - DNA, 20 bp, Artificial Sequence
  source: /note="Description of Artificial Sequence: Synthetic oligonucleotide"
tgatgctgtgcacgggcagg

SEQ ID NO: 1746 - DNA, 20 bp, Artificial Sequence
  source: /note="Description of Artificial Sequence: Synthetic oligonucleotide"
atgatgctgtgcacgggcag

SEQ ID NO: 1747 - DNA, 20 bp, Artificial Sequence
  source: /note="Description of Artificial Sequence: Synthetic oligonucleotide"
gatgatgctgtgcacgggca

SEQ ID NO: 1748 - DNA, 20 bp, Artificial Sequence
  source: /note="Description of Artificial Sequence: Synthetic oligonucleotide"
cgatgatgctgtgcacgggc

SEQ ID NO: 1749 - DNA, 20 bp, Artificial Sequence
  source: /note="Description of Artificial Sequence: Synthetic oligonucleotide"
gcgatgatgctgtgcacggg

SEQ ID NO: 1750 - DNA, 20 bp, Artificial Sequence
  source: /note="Description of Artificial Sequence: Synthetic oligonucleotide"
ggcgatgatgctgtgcacgg

SEQ ID NO: 1751 - DNA, 20 bp, Artificial Sequence
  source: /note="Description of Artificial Sequence: Synthetic oligonucleotide"
aggcgatgatgctgtgcacg

SEQ ID NO: 1752 - DNA, 20 bp, Artificial Sequence
  source: /note="Description of Artificial Sequence: Synthetic oligonucleotide"
gaggcgatgatgctgtgcac

SEQ ID NO: 1753 - DNA, 20 bp, Artificial Sequence
  source: /note="Description of Artificial Sequence: Synthetic oligonucleotide"
ggaggcgatgatgctgtgca

SEQ ID NO: 1754 - DNA, 20 bp, Artificial Sequence
  source: /note="Description of Artificial Sequence: Synthetic oligonucleotide"
tggaggcgatgatgctgtgc

SEQ ID NO: 1755 - DNA, 20 bp, Artificial Sequence
  source: /note="Description of Artificial Sequence: Synthetic oligonucleotide"
atggaggcgatgatgctgtg

SEQ ID NO: 1756 - DNA, 20 bp, Artificial Sequence
  source: /note="Description of Artificial Sequence: Synthetic oligonucleotide"
catggaggcgatgatgctgt

SEQ ID NO: 1757 - DNA, 20 bp, Artificial Sequence
  source: /note="Description of Artificial Sequence: Synthetic oligonucleotide"
ccatggaggcgatgatgctg

SEQ ID NO: 1758 - DNA, 20 bp, Artificial Sequence
  source: /note="Description of Artificial Sequence: Synthetic oligonucleotide"
cccatggaggcgatgatgct

SEQ ID NO: 1759 - DNA, 20 bp, Artificial Sequence
  source: /note="Description of Artificial Sequence: Synthetic oligonucleotide"
ccccatggaggcgatgatgc

SEQ ID NO: 1760 - DNA, 20 bp, Artificial Sequence
  source: /note="Description of Artificial Sequence: Synthetic oligonucleotide"
tccccatggaggcgatgatg

SEQ ID NO: 1761 - DNA, 20 bp, Artificial Sequence
  source: /note="Description of Artificial Sequence: Synthetic oligonucleotide"
gtccccatggaggcgatgat

SEQ ID NO: 1762 - DNA, 20 bp, Artificial Sequence
  source: /note="Description of Artificial Sequence: Synthetic oligonucleotide"
ctgtccccatggaggcgatg

SEQ ID NO: 1763 - DNA, 20 bp, Artificial Sequence
  source: /note="Description of Artificial Sequence: Synthetic oligonucleotide"
actgtccccatggaggcgat

SEQ ID NO: 1764 - DNA, 20 bp, Artificial Sequence
  source: /note="Description of Artificial Sequence: Synthetic oligonucleotide"
cactgtccccatggaggcga

SEQ ID NO: 1765 - DNA, 20 bp, Artificial Sequence
  source: /note="Description of Artificial Sequence: Synthetic oligonucleotide"
ccactgtccccatggaggcg

SEQ ID NO: 1766 - DNA, 20 bp, Artificial Sequence
  source: /note="Description of Artificial Sequence: Synthetic oligonucleotide"
gccactgtccccatggaggc

SEQ ID NO: 1767 - DNA, 20 bp, Artificial Sequence
  source: /note="Description of Artificial Sequence: Synthetic oligonucleotide"
ggccactgtccccatggagg

SEQ ID NO: 1768 - DNA, 20 bp, Artificial Sequence
  source: /note="Description of Artificial Sequence: Synthetic oligonucleotide"
tggccactgtccccatggag

SEQ ID NO: 1769 - DNA, 20 bp, Artificial Sequence
  source: /note="Description of Artificial Sequence: Synthetic oligonucleotide"
atggccactgtccccatgga

SEQ ID NO: 1770 - DNA, 20 bp, Artificial Sequence
  source: /note="Description of Artificial Sequence: Synthetic oligonucleotide"
catggccactgtccccatgg

SEQ ID NO: 1771 - DNA, 20 bp, Artificial Sequence
  source: /note="Description of Artificial Sequence: Synthetic oligonucleotide"
ccatggccactgtccccatg

SEQ ID NO: 1772 - DNA, 20 bp, Artificial Sequence
  source: /note="Description of Artificial Sequence: Synthetic oligonucleotide"
tccatggccactgtccccat

SEQ ID NO: 1773 - DNA, 20 bp, Artificial Sequence
  source: /note="Description of Artificial Sequence: Synthetic oligonucleotide"
gtccatggccactgtcccca

SEQ ID NO: 1774 - DNA, 20 bp, Artificial Sequence
  source: /note="Description of Artificial Sequence: Synthetic oligonucleotide"
ggtccatggccactgtcccc

SEQ ID NO: 1775 - DNA, 20 bp, Artificial Sequence
  source: /note="Description of Artificial Sequence: Synthetic oligonucleotide"
aggtccatggccactgtccc

SEQ ID NO: 1776 - DNA, 20 bp, Artificial Sequence
  source: /note="Description of Artificial Sequence: Synthetic oligonucleotide"
caggtccatggccactgtcc

SEQ ID NO: 1777 - DNA, 20 bp, Artificial Sequence
  source: /note="Description of Artificial Sequence: Synthetic oligonucleotide"
gcaggtccatggccactgtc

SEQ ID NO: 1778 - DNA, 20 bp, Artificial Sequence
  source: /note="Description of Artificial Sequence: Synthetic oligonucleotide"
tgcaggtccatggccactgt

SEQ ID NO: 1779 - DNA, 20 bp, Artificial Sequence
  source: /note="Description of Artificial Sequence: Synthetic oligonucleotide"
ctgcaggtccatggccactg

SEQ ID NO: 1780 - DNA, 20 bp, Artificial Sequence
  source: /note="Description of Artificial Sequence: Synthetic oligonucleotide"
cggtgctctgtgccctgcag

SEQ ID NO: 1781 - DNA, 20 bp, Artificial Sequence
  source: /note="Description of Artificial Sequence: Synthetic oligonucleotide"
ccggtgctctgtgccctgca

SEQ ID NO: 1782 - DNA, 20 bp, Artificial Sequence
  source: /note="Description of Artificial Sequence: Synthetic oligonucleotide"
gccggtgctctgtgccctgc

SEQ ID NO: 1783 - DNA, 20 bp, Artificial Sequence
  source: /note="Description of Artificial Sequence: Synthetic oligonucleotide"
ggccggtgctctgtgccctg

SEQ ID NO: 1784 - DNA, 20 bp, Artificial Sequence
  source: /note="Description of Artificial Sequence: Synthetic oligonucleotide"
aggccggtgctctgtgccct

SEQ ID NO: 1785 - DNA, 20 bp, Artificial Sequence
  source: /note="Description of Artificial Sequence: Synthetic oligonucleotide"
taggccggtgctctgtgccc

SEQ ID NO: 1786 - DNA, 20 bp, Artificial Sequence
  source: /note="Description of Artificial Sequence: Synthetic oligonucleotide"
gtaggccggtgctctgtgcc

SEQ ID NO: 1787 - DNA, 20 bp, Artificial Sequence
  source: /note="Description of Artificial Sequence: Synthetic oligonucleotide"
cgtaggccggtgctctgtgc

SEQ ID NO: 1788 - DNA, 20 bp, Artificial Sequence
  source: /note="Description of Artificial Sequence: Synthetic oligonucleotide"
gcgtaggccggtgctctgtg

SEQ ID NO: 1789 - DNA, 20 bp, Artificial Sequence
  source: /note="Description of Artificial Sequence: Synthetic oligonucleotide"
tgcgtaggccggtgctctgt

SEQ ID NO: 1790 - DNA, 20 bp, Artificial Sequence
  source: /note="Description of Artificial Sequence: Synthetic oligonucleotide"
ctgcgtaggccggtgctctg

SEQ ID NO: 1791 - DNA, 20 bp, Artificial Sequence
  source: /note="Description of Artificial Sequence: Synthetic oligonucleotide"
tctgcgtaggccggtgctct

SEQ ID NO: 1792 - DNA, 20 bp, Artificial Sequence
  source: /note="Description of Artificial Sequence: Synthetic oligonucleotide"
ctctgcgtaggccggtgctc

SEQ ID NO: 1793 - DNA, 20 bp, Artificial Sequence
  source: /note="Description of Artificial Sequence: Synthetic oligonucleotide"
gctctgcgtaggccggtgct

SEQ ID NO: 1794 - DNA, 20 bp, Artificial Sequence
  source: /note="Description of Artificial Sequence: Synthetic oligonucleotide"
cgctctgcgtaggccggtgc

SEQ ID NO: 1795 - DNA, 20 bp, Artificial Sequence
  source: /note="Description of Artificial Sequence: Synthetic oligonucleotide"
ccgctctgcgtaggccggtg

SEQ ID NO: 1796 - DNA, 20 bp, Artificial Sequence
  source: /note="Description of Artificial Sequence: Synthetic oligonucleotide"
gccgctctgcgtaggccggt

SEQ ID NO: 1797 - DNA, 20 bp, Artificial Sequence
  source: /note="Description of Artificial Sequence: Synthetic oligonucleotide"
accgccgctctgcgtaggcc

SEQ ID NO: 1798 - DNA, 20 bp, Artificial Sequence
  source: /note="Description of Artificial Sequence: Synthetic oligonucleotide"
caccgccgctctgcgtaggc

SEQ ID NO: 1799 - DNA, 20 bp, Artificial Sequence
  source: /note="Description of Artificial Sequence: Synthetic oligonucleotide"
ccaccgccgctctgcgtagg

SEQ ID NO: 1800 - DNA, 20 bp, Artificial Sequence
  source: /note="Description of Artificial Sequence: Synthetic oligonucleotide"
cccaccgccgctctgcgtag

SEQ ID NO: 1801 - DNA, 20 bp, Artificial Sequence
  source: /note="Description of Artificial Sequence: Synthetic oligonucleotide"
ccccaccgccgctctgcgta

SEQ ID NO: 1802 - DNA, 20 bp, Artificial Sequence
  source: /note="Description of Artificial Sequence: Synthetic oligonucleotide"
tgccagcttgctgcccccgc

SEQ ID NO: 1803 - DNA, 20 bp, Artificial Sequence
  source: /note="Description of Artificial Sequence: Synthetic oligonucleotide"
gtgccagcttgctgcccccg

SEQ ID NO: 1804 - DNA, 20 bp, Artificial Sequence
  source: /note="Description of Artificial Sequence: Synthetic oligonucleotide"
agtgccagcttgctgccccc

SEQ ID NO: 1805 - DNA, 20 bp, Artificial Sequence
  source: /note="Description of Artificial Sequence: Synthetic oligonucleotide"
cagtgccagcttgctgcccc

SEQ ID NO: 1806 - DNA, 20 bp, Artificial Sequence
  source: /note="Description of Artificial Sequence: Synthetic oligonucleotide"
gcagtgccagcttgctgccc

SEQ ID NO: 1807 - DNA, 20 bp, Artificial Sequence
  source: /note="Description of Artificial Sequence: Synthetic oligonucleotide"
ggcagtgccagcttgctgcc

SEQ ID NO: 1808 - DNA, 20 bp, Artificial Sequence
  source: /note="Description of Artificial Sequence: Synthetic oligonucleotide"
gggcagtgccagcttgctgc

SEQ ID NO: 1809 - DNA, 20 bp, Artificial Sequence
  source: /note="Description of Artificial Sequence: Synthetic oligonucleotide"
tgggcagtgccagcttgctg

SEQ ID NO: 1810 - DNA, 20 bp, Artificial Sequence
  source: /note="Description of Artificial Sequence: Synthetic oligonucleotide"
gtgggcagtgccagcttgct

SEQ ID NO: 1811 - DNA, 20 bp, Artificial Sequence
  source: /note="Description of Artificial Sequence: Synthetic oligonucleotide"
cgtgggcagtgccagcttgc

SEQ ID NO: 1812 - DNA, 20 bp, Artificial Sequence
  source: /note="Description of Artificial Sequence: Synthetic oligonucleotide"
ccgtgggcagtgccagcttg

SEQ ID NO: 1813 - DNA, 20 bp, Artificial Sequence
  source: /note="Description of Artificial Sequence: Synthetic oligonucleotide"
tccgtgggcagtgccagctt

SEQ ID NO: 1814 - DNA, 20 bp, Artificial Sequence
  source: /note="Description of Artificial Sequence: Synthetic oligonucleotide"
ctccgtgggcagtgccagct

SEQ ID NO: 1815 - DNA, 20 bp, Artificial Sequence
  source: /note="Description of Artificial Sequence: Synthetic oligonucleotide"
tctccgtgggcagtgccagc

SEQ ID NO: 1816 - DNA, 20 bp, Artificial Sequence
  source: /note="Description of Artificial Sequence: Synthetic oligonucleotide"
ttctccgtgggcagtgccag

SEQ ID NO: 1817 - DNA, 20 bp, Artificial Sequence
  source: /note="Description of Artificial Sequence: Synthetic oligonucleotide"
gttctccgtgggcagtgcca

SEQ ID NO: 1818 - DNA, 20 bp, Artificial Sequence
  source: /note="Description of Artificial Sequence: Synthetic oligonucleotide"
cgttctccgtgggcagtgcc

SEQ ID NO: 1819 - DNA, 20 bp, Artificial Sequence
  source: /note="Description of Artificial Sequence: Synthetic oligonucleotide"
ccgttctccgtgggcagtgc

SEQ ID NO: 1820 - DNA, 20 bp, Artificial Sequence
  source: /note="Description of Artificial Sequence: Synthetic oligonucleotide"
gccgttctccgtgggcagtg

SEQ ID NO: 1821 - DNA, 20 bp, Artificial Sequence
  source: /note="Description of Artificial Sequence: Synthetic oligonucleotide"
agccgttctccgtgggcagt

SEQ ID NO: 1822 - DNA, 20 bp, Artificial Sequence
  source: /note="Description of Artificial Sequence: Synthetic oligonucleotide"
gagccgttctccgtgggcag

SEQ ID NO: 1823 - DNA, 20 bp, Artificial Sequence
  source: /note="Description of Artificial Sequence: Synthetic oligonucleotide"
cgagccgttctccgtgggca

SEQ ID NO: 1824 - DNA, 20 bp, Artificial Sequence
  source: /note="Description of Artificial Sequence: Synthetic oligonucleotide"
ccgagccgttctccgtgggc

SEQ ID NO: 1825 - DNA, 20 bp, Artificial Sequence
  source: /note="Description of Artificial Sequence: Synthetic oligonucleotide"
cccgagccgttctccgtggg

SEQ ID NO: 1826 - DNA, 20 bp, Artificial Sequence
  source: /note="Description of Artificial Sequence: Synthetic oligonucleotide"
gcccgagccgttctccgtgg

SEQ ID NO: 1827 - DNA, 20 bp, Artificial Sequence
  source: /note="Description of Artificial Sequence: Synthetic oligonucleotide"
tgcccgagccgttctccgtg

SEQ ID NO: 1828 - DNA, 20 bp, Artificial Sequence
  source: /note="Description of Artificial Sequence: Synthetic oligonucleotide"
ctgcccgagccgttctccgt

SEQ ID NO: 1829 - DNA, 20 bp, Artificial Sequence
  source: /note="Description of Artificial Sequence: Synthetic oligonucleotide"
gctgcccgagccgttctccg

SEQ ID NO: 1830 - DNA, 20 bp, Artificial Sequence
  source: /note="Description of Artificial Sequence: Synthetic oligonucleotide"
ggctgcccgagccgttctcc

SEQ ID NO: 1831 - DNA, 20 bp, Artificial Sequence
  source: /note="Description of Artificial Sequence: Synthetic oligonucleotide"
cggctgcccgagccgttctc

SEQ ID NO: 1832 - DNA, 20 bp, Artificial Sequence
  source: /note="Description of Artificial Sequence: Synthetic oligonucleotide"
ccggctgcccgagccgttct

SEQ ID NO: 1833 - DNA, 20 bp, Artificial Sequence
  source: /note="Description of Artificial Sequence: Synthetic oligonucleotide"
aggacgggcgcgatgctggg

SEQ ID NO: 1834 - DNA, 20 bp, Artificial Sequence
  source: /note="Description of Artificial Sequence: Synthetic oligonucleotide"
caggacgggcgcgatgctgg

SEQ ID NO: 1835 - DNA, 20 bp, Artificial Sequence
  source: /note="Description of Artificial Sequence: Synthetic oligonucleotide"
ccaggacgggcgcgatgctg

SEQ ID NO: 1836 - DNA, 20 bp, Artificial Sequence
  source: /note="Description of Artificial Sequence: Synthetic oligonucleotide"
tccaggacgggcgcgatgct

SEQ ID NO: 1837 - DNA, 20 bp, Artificial Sequence
  source: /note="Description of Artificial Sequence: Synthetic oligonucleotide"
ttccaggacgggcgcgatgc

SEQ ID NO: 1838 - DNA, 20 bp, Artificial Sequence
  source: /note="Description of Artificial Sequence: Synthetic oligonucleotide"
gttccaggacgggcgcgatg

SEQ ID NO: 1839 - DNA, 20 bp, Artificial Sequence
  source: /note="Description of Artificial Sequence: Synthetic oligonucleotide"
agttccaggacgggcgcgat

SEQ ID NO: 1840 - DNA, 20 bp, Artificial Sequence
  source: /note="Description of Artificial Sequence: Synthetic oligonucleotide"
cagttccaggacgggcgcga

SEQ ID NO: 1841 - DNA, 20 bp, Artificial Sequence
  source: /note="Description of Artificial Sequence: Synthetic oligonucleotide"
ccagttccaggacgggcgcg

SEQ ID NO: 1842 - DNA, 20 bp, Artificial Sequence
  source: /note="Description of Artificial Sequence: Synthetic oligonucleotide"
gccagttccaggacgggcgc

SEQ ID NO: 1843 - DNA, 20 bp, Artificial Sequence
  source: /note="Description of Artificial Sequence: Synthetic oligonucleotide"
ggccagttccaggacgggcg

SEQ ID NO: 1844 - DNA, 20 bp, Artificial Sequence
  source: /note="Description of Artificial Sequence: Synthetic oligonucleotide"
cggccagttccaggacgggc

SEQ ID NO: 1845 - DNA, 20 bp, Artificial Sequence
  source: /note="Description of Artificial Sequence: Synthetic oligonucleotide"
tcggccagttccaggacggg

SEQ ID NO: 1846 - DNA, 20 bp, Artificial Sequence
  source: /note="Description of Artificial Sequence: Synthetic oligonucleotide"
gtcggccagttccaggacgg

SEQ ID NO: 1847 - DNA, 20 bp, Artificial Sequence
  source: /note="Description of Artificial Sequence: Synthetic oligonucleotide"
tgtcggccagttccaggacg

SEQ ID NO: 1848 - DNA, 20 bp, Artificial Sequence
  source: /note="Description of Artificial Sequence: Synthetic oligonucleotide"
ctgtcggccagttccaggac

SEQ ID NO: 1849 - DNA, 20 bp, Artificial Sequence
  source: /note="Description of Artificial Sequence: Synthetic oligonucleotide"
gctgtcggccagttccagga

SEQ ID NO: 1850 - DNA, 20 bp, Artificial Sequence
  source: /note="Description of Artificial Sequence: Synthetic oligonucleotide"
agctgtcggccagttccagg

SEQ ID NO: 1851 - DNA, 20 bp, Artificial Sequence
  source: /note="Description of Artificial Sequence: Synthetic oligonucleotide"
gagctgtcggccagttccag

SEQ ID NO: 1852 - DNA, 20 bp, Artificial Sequence
  source: /note="Description of Artificial Sequence: Synthetic oligonucleotide"
tgagctgtcggccagttcca

SEQ ID NO: 1853 - DNA, 20 bp, Artificial Sequence
  source: /note="Description of Artificial Sequence: Synthetic oligonucleotide"
ctgagctgtcggccagttcc

SEQ ID NO: 1854 - DNA, 20 bp, Artificial Sequence
  source: /note="Description of Artificial Sequence: Synthetic oligonucleotide"
gctgagctgtcggccagttc

SEQ ID NO: 1855 - DNA, 20 bp, Artificial Sequence
  source: /note="Description of Artificial Sequence: Synthetic oligonucleotide"
ggctgagctgtcggccagtt

SEQ ID NO: 1856 - DNA, 20 bp, Artificial Sequence
  source: /note="Description of Artificial Sequence: Synthetic oligonucleotide"
gggctgagctgtcggccagt

SEQ ID NO: 1857 - DNA, 20 bp, Artificial Sequence
  source: /note="Description of Artificial Sequence: Synthetic oligonucleotide"
agggctgagctgtcggccag

SEQ ID NO: 1858 - DNA, 20 bp, Artificial Sequence
  source: /note="Description of Artificial Sequence: Synthetic oligonucleotide"
cagggctgagctgtcggcca

SEQ ID NO: 1859 - DNA, 20 bp, Artificial Sequence
  source: /note="Description of Artificial Sequence: Synthetic oligonucleotide"
gcagggctgagctgtcggcc

SEQ ID NO: 1860 - DNA, 20 bp, Artificial Sequence
  source: /note="Description of Artificial Sequence: Synthetic oligonucleotide"
agcagggctgagctgtcggc

SEQ ID NO: 1861 - DNA, 20 bp, Artificial Sequence
  source: /note="Description of Artificial Sequence: Synthetic oligonucleotide"
cagcagggctgagctgtcgg

SEQ ID NO: 1862 - DNA, 20 bp, Artificial Sequence
  source: /note="Description of Artificial Sequence: Synthetic oligonucleotide"
gcagcagggctgagctgtcg

SEQ ID NO: 1863 - DNA, 20 bp, Artificial Sequence
  source: /note="Description of Artificial Sequence: Synthetic oligonucleotide"
ggcagcagggctgagctgtc

SEQ ID NO: 1864 - DNA, 20 bp, Artificial Sequence
  source: /note="Description of Artificial Sequence: Synthetic oligonucleotide"
gggcagcagggctgagctgt

SEQ ID NO: 1865 - DNA, 20 bp, Artificial Sequence
  source: /note="Description of Artificial Sequence: Synthetic oligonucleotide"
agggcagcagggctgagctg

SEQ ID NO: 1866 - DNA, 20 bp, Artificial Sequence
  source: /note="Description of Artificial Sequence: Synthetic oligonucleotide"
cagggcagcagggctgagct

SEQ ID NO: 1867 - DNA, 20 bp, Artificial Sequence
  source: /note="Description of Artificial Sequence: Synthetic oligonucleotide"
gcagggcagcagggctgagc

SEQ ID NO: 1868 - DNA, 20 bp, Artificial Sequence
  source: /note="Description of Artificial Sequence: Synthetic oligonucleotide"
cgcagggcagcagggctgag

SEQ ID NO: 1869 - DNA, 20 bp, Artificial Sequence
  source: /note="Description of Artificial Sequence: Synthetic oligonucleotide"
tcgcagggcagcagggctga

SEQ ID NO: 1870 - DNA, 20 bp, Artificial Sequence
  source: /note="Description of Artificial Sequence: Synthetic oligonucleotide"
gtcgcagggcagcagggctg

SEQ ID NO: 1871 - DNA, 20 bp, Artificial Sequence
  source: /note="Description of Artificial Sequence: Synthetic oligonucleotide"
ggtcgcagggcagcagggct

SEQ ID NO: 1872 - DNA, 20 bp, Artificial Sequence
  source: /note="Description of Artificial Sequence: Synthetic oligonucleotide"
aggtcgcagggcagcagggc

SEQ ID NO: 1873 - DNA, 20 bp, Artificial Sequence
  source: /note="Description of Artificial Sequence: Synthetic oligonucleotide"
caggtcgcagggcagcaggg

SEQ ID NO: 1874 - DNA, 20 bp, Artificial Sequence
  source: /note="Description of Artificial Sequence: Synthetic oligonucleotide"
gcaggtcgcagggcagcagg

SEQ ID NO: 1875 - DNA, 20 bp, Artificial Sequence
  source: /note="Description of Artificial Sequence: Synthetic oligonucleotide"
agcaggtcgcagggcagcag

SEQ ID NO: 1876 - DNA, 20 bp, Artificial Sequence
  source: /note="Description of Artificial Sequence: Synthetic oligonucleotide"
cagcaggtcgcagggcagca

SEQ ID NO: 1877 - DNA, 20 bp, Artificial Sequence
  source: /note="Description of Artificial Sequence: Synthetic oligonucleotide"
tcagcaggtcgcagggcagc

SEQ ID NO: 1878 - DNA, 20 bp, Artificial Sequence
  source: /note="Description of Artificial Sequence: Synthetic oligonucleotide"
ctcagcaggtcgcagggcag

SEQ ID NO: 1879 - DNA, 20 bp, Artificial Sequence
  source: /note="Description of Artificial Sequence: Synthetic oligonucleotide"
gctcagcaggtcgcagggca

SEQ ID NO: 1880 - DNA, 20 bp, Artificial Sequence
  source: /note="Description of Artificial Sequence: Synthetic oligonucleotide"
cgctcagcaggtcgcagggc

SEQ ID NO: 1881 - DNA, 20 bp, Artificial Sequence
  source: /note="Description of Artificial Sequence: Synthetic oligonucleotide"
tcgctcagcaggtcgcaggg

SEQ ID NO: 1882 - DNA, 20 bp, Artificial Sequence
  source: /note="Description of Artificial Sequence: Synthetic oligonucleotide"
gtcgctcagcaggtcgcagg

SEQ ID NO: 1883 - DNA, 20 bp, Artificial Sequence
  source: /note="Description of Artificial Sequence: Synthetic oligonucleotide"
ggtcgctcagcaggtcgcag

SEQ ID NO: 1884 - DNA, 20 bp, Artificial Sequence
  source: /note="Description of Artificial Sequence: Synthetic oligonucleotide"
tggtcgctcagcaggtcgca

SEQ ID NO: 1885 - DNA, 20 bp, Artificial Sequence
  source: /note="Description of Artificial Sequence: Synthetic oligonucleotide"
ctggtcgctcagcaggtcgc

SEQ ID NO: 1886 - DNA, 20 bp, Artificial Sequence
  source: /note="Description of Artificial Sequence: Synthetic oligonucleotide"
actggtcgctcagcaggtcg

SEQ ID NO: 1887 - DNA, 20 bp, Artificial Sequence
  source: /note="Description of Artificial Sequence: Synthetic oligonucleotide"
gactggtcgctcagcaggtc

SEQ ID NO: 1888 - DNA, 20 bp, Artificial Sequence
  source: /note="Description of Artificial Sequence: Synthetic oligonucleotide"
cgactggtcgctcagcaggt

SEQ ID NO: 1889 - DNA, 20 bp, Artificial Sequence
  source: /note="Description of Artificial Sequence: Synthetic oligonucleotide"
ccgactggtcgctcagcagg

SEQ ID NO: 1890 - DNA, 20 bp, Artificial Sequence
  source: /note="Description of Artificial Sequence: Synthetic oligonucleotide"
tccgactggtcgctcagcag

SEQ ID NO: 1891 - DNA, 20 bp, Artificial Sequence
  source: /note="Description of Artificial Sequence: Synthetic oligonucleotide"
ctccgactggtcgctcagca

SEQ ID NO: 1892 - DNA, 20 bp, Artificial Sequence
  source: /note="Description of Artificial Sequence: Synthetic oligonucleotide"
cctccgactggtcgctcagc

SEQ ID NO: 1893 - DNA, 20 bp, Artificial Sequence
  source: /note="Description of Artificial Sequence: Synthetic oligonucleotide"
tcctccgactggtcgctcag

SEQ ID NO: 1894 - DNA, 20 bp, Artificial Sequence
  source: /note="Description of Artificial Sequence: Synthetic oligonucleotide"
atcctccgactggtcgctca

SEQ ID NO: 1895 - DNA, 20 bp, Artificial Sequence
  source: /note="Description of Artificial Sequence: Synthetic oligonucleotide"
catcctccgactggtcgctc

SEQ ID NO: 1896 - DNA, 20 bp, Artificial Sequence
  source: /note="Description of Artificial Sequence: Synthetic oligonucleotide"
tcatcctccgactggtcgct

SEQ ID NO: 1897 - DNA, 20 bp, Artificial Sequence
  source: /note="Description of Artificial Sequence: Synthetic oligonucleotide"
ctcatcctccgactggtcgc

SEQ ID NO: 1898 - DNA, 20 bp, Artificial Sequence
  source: /note="Description of Artificial Sequence: Synthetic oligonucleotide"
cctcatcctccgactggtcg

SEQ ID NO: 1899 - DNA, 20 bp, Artificial Sequence
  source: /note="Description of Artificial Sequence: Synthetic oligonucleotide"
acctcatcctccgactggtc

SEQ ID NO: 1900 - DNA, 20 bp, Artificial Sequence
  source: /note="Description of Artificial Sequence: Synthetic oligonucleotide"
cacctcatcctccgactggt

SEQ ID NO: 1901 - DNA, 20 bp, Artificial Sequence
  source: /note="Description of Artificial Sequence: Synthetic oligonucleotide"
tcacctcatcctccgactgg

SEQ ID NO: 1902 - DNA, 20 bp, Artificial Sequence
  source: /note="Description of Artificial Sequence: Synthetic oligonucleotide"
gtcacctcatcctccgactg

SEQ ID NO: 1903 - DNA, 20 bp, Artificial Sequence
  source: /note="Description of Artificial Sequence: Synthetic oligonucleotide"
cgtcacctcatcctccgact

SEQ ID NO: 1904 - DNA, 20 bp, Artificial Sequence
  source: /note="Description of Artificial Sequence: Synthetic oligonucleotide"
gcgtcacctcatcctccgac

SEQ ID NO: 1905 - DNA, 20 bp, Artificial Sequence
  source: /note="Description of Artificial Sequence: Synthetic oligonucleotide"
ggcgtcacctcatcctccga

SEQ ID NO: 1906 - DNA, 20 bp, Artificial Sequence
  source: /note="Description of Artificial Sequence: Synthetic oligonucleotide"
cggcgtcacctcatcctccg

SEQ ID NO: 1907 - DNA, 20 bp, Artificial Sequence
  source: /note="Description of Artificial Sequence: Synthetic oligonucleotide"
acggcgtcacctcatcctcc

SEQ ID NO: 1908 - DNA, 20 bp, Artificial Sequence
  source: /note="Description of Artificial Sequence: Synthetic oligonucleotide"
gacggcgtcacctcatcctc

SEQ ID NO: 1909 - DNA, 20 bp, Artificial Sequence
  source: /note="Description of Artificial Sequence: Synthetic oligonucleotide"
cgacggcgtcacctcatcct

SEQ ID NO: 1910 - DNA, 20 bp, Artificial Sequence
  source: /note="Description of Artificial Sequence: Synthetic oligonucleotide"
ccgacggcgtcacctcatcc

SEQ ID NO: 1911 - DNA, 20 bp, Artificial Sequence
  source: /note="Description of Artificial Sequence: Synthetic oligonucleotide"
tccgacggcgtcacctcatc

SEQ ID NO: 1912 - DNA, 20 bp, Artificial Sequence
  source: /note="Description of Artificial Sequence: Synthetic oligonucleotide"
gtccgacggcgtcacctcat

SEQ ID NO: 1913 - DNA, 20 bp, Artificial Sequence
  source: /note="Description of Artificial Sequence: Synthetic oligonucleotide"
cgtccgacggcgtcacctca

SEQ ID NO: 1914 - DNA, 20 bp, Artificial Sequence
  source: /note="Description of Artificial Sequence: Synthetic oligonucleotide"
tcgtccgacggcgtcacctc

SEQ ID NO: 1915 - DNA, 20 bp, Artificial Sequence
  source: /note="Description of Artificial Sequence: Synthetic oligonucleotide"
gtcgtccgacggcgtcacct

SEQ ID NO: 1916 - DNA, 20 bp, Artificial Sequence
  source: /note="Description of Artificial Sequence: Synthetic oligonucleotide"
cgtcgtccgacggcgtcacc

SEQ ID NO: 1917 - DNA, 20 bp, Artificial Sequence
  source: /note="Description of Artificial Sequence: Synthetic oligonucleotide"
tcgtcgtccgacggcgtcac

SEQ ID NO: 1918 - DNA, 20 bp, Artificial Sequence
  source: /note="Description of Artificial Sequence: Synthetic oligonucleotide"
ctcgtcgtccgacggcgtca

SEQ ID NO: 1919 - DNA, 20 bp, Artificial Sequence
  source: /note="Description of Artificial Sequence: Synthetic oligonucleotide"
cctcgtcgtccgacggcgtc

SEQ ID NO: 1920 - DNA, 20 bp, Artificial Sequence
  source: /note="Description of Artificial Sequence: Synthetic oligonucleotide"
ccctcgtcgtccgacggcgt

SEQ ID NO: 1921 - DNA, 20 bp, Artificial Sequence
  source: /note="Description of Artificial Sequence: Synthetic oligonucleotide"
agcccctcgtcgtccgacgg

SEQ ID NO: 1922 - DNA, 20 bp, Artificial Sequence
  source: /note="Description of Artificial Sequence: Synthetic oligonucleotide"
gagcccctcgtcgtccgacg

SEQ ID NO: 1923 - DNA, 20 bp, Artificial Sequence
  source: /note="Description of Artificial Sequence: Synthetic oligonucleotide"
agagcccctcgtcgtccgac

SEQ ID NO: 1924 - DNA, 20 bp, Artificial Sequence
  source: /note="Description of Artificial Sequence: Synthetic oligonucleotide"
gagagcccctcgtcgtccga

SEQ ID NO: 1925 - DNA, 20 bp, Artificial Sequence
  source: /note="Description of Artificial Sequence: Synthetic oligonucleotide"
ggagagcccctcgtcgtccg

SEQ ID NO: 1926 - DNA, 20 bp, Artificial Sequence
  source: /note="Description of Artificial Sequence: Synthetic oligonucleotide"
cggagagcccctcgtcgtcc

SEQ ID NO: 1927 - DNA, 20 bp, Artificial Sequence
  source: /note="Description of Artificial Sequence: Synthetic oligonucleotide"
acggagagcccctcgtcgtc

SEQ ID NO: 1928 - DNA, 20 bp, Artificial Sequence
  source: /note="Description of Artificial Sequence: Synthetic oligonucleotide"
cacggagagcccctcgtcgt

SEQ ID NO: 1929 - DNA, 20 bp, Artificial Sequence
  source: /note="Description of Artificial Sequence: Synthetic oligonucleotide"
ccacggagagcccctcgtcg

SEQ ID NO: 1930 - DNA, 20 bp, Artificial Sequence
  source: /note="Description of Artificial Sequence: Synthetic oligonucleotide"
accacggagagcccctcgtc

SEQ ID NO: 1931 - DNA, 20 bp, Artificial Sequence
  source: /note="Description of Artificial Sequence: Synthetic oligonucleotide"
taccacggagagcccctcgt

SEQ ID NO: 1932 - DNA, 20 bp, Artificial Sequence
  source: /note="Description of Artificial Sequence: Synthetic oligonucleotide"
ctaccacggagagcccctcg

SEQ ID NO: 1933 - DNA, 20 bp, Artificial Sequence
  source: /note="Description of Artificial Sequence: Synthetic oligonucleotide"
tctaccacggagagcccctc

SEQ ID NO: 1934 - DNA, 20 bp, Artificial Sequence
  source: /note="Description of Artificial Sequence: Synthetic oligonucleotide"
ctctaccacggagagcccct

SEQ ID NO: 1935 - DNA, 20 bp, Artificial Sequence
  source: /note="Description of Artificial Sequence: Synthetic oligonucleotide"
actctaccacggagagcccc

SEQ ID NO: 1936 - DNA, 20 bp, Artificial Sequence
  source: /note="Description of Artificial Sequence: Synthetic oligonucleotide"
tactctaccacggagagccc

SEQ ID NO: 1937 - DNA, 20 bp, Artificial Sequence
  source: /note="Description of Artificial Sequence: Synthetic oligonucleotide"
atactctaccacggagagcc

SEQ ID NO: 1938 - DNA, 20 bp, Artificial Sequence
  source: /note="Description of Artificial Sequence: Synthetic oligonucleotide"
catactctaccacggagagc

SEQ ID NO: 1939 - DNA, 20 bp, Artificial Sequence
  source: /note="Description of Artificial Sequence: Synthetic oligonucleotide"
acatactctaccacggagag

SEQ ID NO: 1940 - DNA, 20 bp, Artificial Sequence
  source: /note="Description of Artificial Sequence: Synthetic oligonucleotide"
cacatactctaccacggaga

SEQ ID NO: 1941 - DNA, 20 bp, Artificial Sequence
  source: /note="Description of Artificial Sequence: Synthetic oligonucleotide"
tcacatactctaccacggag

SEQ ID NO: 1942 - DNA, 20 bp, Artificial Sequence
  source: /note="Description of Artificial Sequence: Synthetic oligonucleotide"
ttcacatactctaccacgga

SEQ ID NO: 1943 - DNA, 20 bp, Artificial Sequence
  source: /note="Description of Artificial Sequence: Synthetic oligonucleotide"
cttcacatactctaccacgg

SEQ ID NO: 1944 - DNA, 20 bp, Artificial Sequence
  source: /note="Description of Artificial Sequence: Synthetic oligonucleotide"
ccttcacatactctaccacg

SEQ ID NO: 1945 - DNA, 20 bp, Artificial Sequence
  source: /note="Description of Artificial Sequence: Synthetic oligonucleotide"
cccttcacatactctaccac

SEQ ID NO: 1946 - DNA, 20 bp, Artificial Sequence
  source: /note="Description of Artificial Sequence: Synthetic oligonucleotide"
gcccttcacatactctacca

SEQ ID NO: 1947 - DNA, 20 bp, Artificial Sequence
  source: /note="Description of Artificial Sequence: Synthetic oligonucleotide"
agcccttcacatactctacc

SEQ ID NO: 1948 - DNA, 20 bp, Artificial Sequence
  source: /note="Description of Artificial Sequence: Synthetic oligonucleotide"
tagcccttcacatactctac

SEQ ID NO: 1949 - DNA, 20 bp, Artificial Sequence
  source: /note="Description of Artificial Sequence: Synthetic oligonucleotide"
gtagcccttcacatactcta

SEQ ID NO: 1950 - DNA, 20 bp, Artificial Sequence
  source: /note="Description of Artificial Sequence: Synthetic oligonucleotide"
ggtagcccttcacatactct

SEQ ID NO: 1951 - DNA, 20 bp, Artificial Sequence
  source: /note="Description of Artificial Sequence: Synthetic oligonucleotide"
gggtagcccttcacatactc

SEQ ID NO: 1952 - DNA, 20 bp, Artificial Sequence
  source: /note="Description of Artificial Sequence: Synthetic oligonucleotide"
agggtagcccttcacatact

SEQ ID NO: 1953 - DNA, 20 bp, Artificial Sequence
  source: /note="Description of Artificial Sequence: Synthetic oligonucleotide"
gagggtagcccttcacatac

SEQ ID NO: 1954 - DNA, 20 bp, Artificial Sequence
  source: /note="Description of Artificial Sequence: Synthetic oligonucleotide"
ggagggtagcccttcacata

SEQ ID NO: 1955 - DNA, 20 bp, Artificial Sequence
  source: /note="Description of Artificial Sequence: Synthetic oligonucleotide"
gggagggtagcccttcacat

SEQ ID NO: 1956 - DNA, 20 bp, Artificial Sequence
  source: /note="Description of Artificial Sequence: Synthetic oligonucleotide"
tgggagggtagcccttcaca

SEQ ID NO: 1957 - DNA, 20 bp, Artificial Sequence
  source: /note="Description of Artificial Sequence: Synthetic oligonucleotide"
gttgggagggtagcccttca

SEQ ID NO: 1958 - DNA, 20 bp, Artificial Sequence
  source: /note="Description of Artificial Sequence: Synthetic oligonucleotide"
agttgggagggtagcccttc

SEQ ID NO: 1959 - DNA, 20 bp, Artificial Sequence
  source: /note="Description of Artificial Sequence: Synthetic oligonucleotide"
gagttgggagggtagccctt

SEQ ID NO: 1960 - DNA, 20 bp, Artificial Sequence
  source: /note="Description of Artificial Sequence: Synthetic oligonucleotide"
cgagttgggagggtagccct

SEQ ID NO: 1961 - DNA, 20 bp, Artificial Sequence
  source: /note="Description of Artificial Sequence: Synthetic oligonucleotide"
gcgagttgggagggtagccc

SEQ ID NO: 1962 - DNA, 20 bp, Artificial Sequence
  source: /note="Description of Artificial Sequence: Synthetic oligonucleotide"
ggcgagttgggagggtagcc

SEQ ID NO: 1963 - DNA, 20 bp, Artificial Sequence
  source: /note="Description of Artificial Sequence: Synthetic oligonucleotide"
gggcgagttgggagggtagc

SEQ ID NO: 1964 - DNA, 20 bp, Artificial Sequence
  source: /note="Description of Artificial Sequence: Synthetic oligonucleotide"
agggcgagttgggagggtag

SEQ ID NO: 1965 - DNA, 20 bp, Artificial Sequence
  source: /note="Description of Artificial Sequence: Synthetic oligonucleotide"
tagggcgagttgggagggta

SEQ ID NO: 1966 - DNA, 20 bp, Artificial Sequence
  source: /note="Description of Artificial Sequence: Synthetic oligonucleotide"
gtagggcgagttgggagggt

SEQ ID NO: 1967 - DNA, 20 bp, Artificial Sequence
  source: /note="Description of Artificial Sequence: Synthetic oligonucleotide"
tgtagggcgagttgggaggg

SEQ ID NO: 1968 - DNA, 20 bp, Artificial Sequence
  source: /note="Description of Artificial Sequence: Synthetic oligonucleotide"
atgtagggcgagttgggagg

SEQ ID NO: 1969 - DNA, 20 bp, Artificial Sequence
  source: /note="Description of Artificial Sequence: Synthetic oligonucleotide"
gatgtagggcgagttgggag

SEQ ID NO: 1970 - DNA, 20 bp, Artificial Sequence
  source: /note="Description of Artificial Sequence: Synthetic oligonucleotide"
cgatgtagggcgagttggga

SEQ ID NO: 1971 - DNA, 20 bp, Artificial Sequence
  source: /note="Description of Artificial Sequence: Synthetic oligonucleotide"
ccgatgtagggcgagttggg

SEQ ID NO: 1972 - DNA, 20 bp, Artificial Sequence
  source: /note="Description of Artificial Sequence: Synthetic oligonucleotide"
gccgatgtagggcgagttgg

SEQ ID NO: 1973 - DNA, 20 bp, Artificial Sequence
  source: /note="Description of Artificial Sequence: Synthetic oligonucleotide"
tgccgatgtagggcgagttg

SEQ ID NO: 1974 - DNA, 20 bp, Artificial Sequence
  source: /note="Description of Artificial Sequence: Synthetic oligonucleotide"
ctgccgatgtagggcgagtt

SEQ ID NO: 1975 - DNA, 20 bp, Artificial Sequence
  source: /note="Description of Artificial Sequence: Synthetic oligonucleotide"
gctgccgatgtagggcgagt

SEQ ID NO: 1976 - DNA, 20 bp, Artificial Sequence
  source: /note="Description of Artificial Sequence: Synthetic oligonucleotide"
agctgccgatgtagggcgag

SEQ ID NO: 1977 - DNA, 20 bp, Artificial Sequence
  source: /note="Description of Artificial Sequence: Synthetic oligonucleotide"
gagctgccgatgtagggcga

SEQ ID NO: 1978 - DNA, 20 bp, Artificial Sequence
  source: /note="Description of Artificial Sequence: Synthetic oligonucleotide"
ggagctgccgatgtagggcg

SEQ ID NO: 1979 - DNA, 20 bp, Artificial Sequence
  source: /note="Description of Artificial Sequence: Synthetic oligonucleotide"
gggagctgccgatgtagggc

SEQ ID NO: 1980 - DNA, 20 bp, Artificial Sequence
  source: /note="Description of Artificial Sequence: Synthetic oligonucleotide"
ggaggtggcacagggttggg

SEQ ID NO: 1981 - DNA, 20 bp, Artificial Sequence
  source: /note="Description of Artificial Sequence: Synthetic oligonucleotide"
aggaggtggcacagggttgg

SEQ ID NO: 1982 - DNA, 20 bp, Artificial Sequence
  source: /note="Description of Artificial Sequence: Synthetic oligonucleotide"
caggaggtggcacagggttg

SEQ ID NO: 1983 - DNA, 20 bp, Artificial Sequence
  source: /note="Description of Artificial Sequence: Synthetic oligonucleotide"
gcaggaggtggcacagggtt

SEQ ID NO: 1984 - DNA, 20 bp, Artificial Sequence
  source: /note="Description of Artificial Sequence: Synthetic oligonucleotide"
ggcaggaggtggcacagggt

SEQ ID NO: 1985 - DNA, 20 bp, Artificial Sequence
  source: /note="Description of Artificial Sequence: Synthetic oligonucleotide"
aggcaggaggtggcacaggg

SEQ ID NO: 1986 - DNA, 20 bp, Artificial Sequence
  source: /note="Description of Artificial Sequence: Synthetic oligonucleotide"
caggcaggaggtggcacagg

SEQ ID NO: 1987 - DNA, 20 bp, Artificial Sequence
  source: /note="Description of Artificial Sequence: Synthetic oligonucleotide"
acaggcaggaggtggcacag

SEQ ID NO: 1988 - DNA, 20 bp, Artificial Sequence
  source: /note="Description of Artificial Sequence: Synthetic oligonucleotide"
cacaggcaggaggtggcaca

SEQ ID NO: 1989 - DNA, 20 bp, Artificial Sequence
  source: /note="Description of Artificial Sequence: Synthetic oligonucleotide"
tcacaggcaggaggtggcac

SEQ ID NO: 1990 - DNA, 20 bp, Artificial Sequence
  source: /note="Description of Artificial Sequence: Synthetic oligonucleotide"
ttcacaggcaggaggtggca

SEQ ID NO: 1991 - DNA, 20 bp, Artificial Sequence
  source: /note="Description of Artificial Sequence: Synthetic oligonucleotide"
tttcacaggcaggaggtggc

SEQ ID NO: 1992 - DNA, 20 bp, Artificial Sequence
  source: /note="Description of Artificial Sequence: Synthetic oligonucleotide"
ctttcacaggcaggaggtgg

SEQ ID NO: 1993 - DNA, 20 bp, Artificial Sequence
  source: /note="Description of Artificial Sequence: Synthetic oligonucleotide"
gctttcacaggcaggaggtg

SEQ ID NO: 1994 - DNA, 20 bp, Artificial Sequence
  source: /note="Description of Artificial Sequence: Synthetic oligonucleotide"
ggctttcacaggcaggaggt

SEQ ID NO: 1995 - DNA, 20 bp, Artificial Sequence
  source: /note="Description of Artificial Sequence: Synthetic oligonucleotide"
gggctttcacaggcaggagg

SEQ ID NO: 1996 - DNA, 20 bp, Artificial Sequence
  source: /note="Description of Artificial Sequence: Synthetic oligonucleotide"
agccgcaggcagcagaaggg

SEQ ID NO: 1997 - DNA, 20 bp, Artificial Sequence
  source: /note="Description of Artificial Sequence: Synthetic oligonucleotide"
cagccgcaggcagcagaagg

SEQ ID NO: 1998 - DNA, 20 bp, Artificial Sequence
  source: /note="Description of Artificial Sequence: Synthetic oligonucleotide"
ccagccgcaggcagcagaag

SEQ ID NO: 1999 - DNA, 20 bp, Artificial Sequence
  source: /note="Description of Artificial Sequence: Synthetic oligonucleotide"
tccagccgcaggcagcagaa

SEQ ID NO: 2000 - DNA, 20 bp, Artificial Sequence
  source: /note="Description of Artificial Sequence: Synthetic oligonucleotide"
gtccagccgcaggcagcaga

SEQ ID NO: 2001 - DNA, 20 bp, Artificial Sequence
  source: /note="Description of Artificial Sequence: Synthetic oligonucleotide"
tgtccagccgcaggcagcag

SEQ ID NO: 2002 - DNA, 20 bp, Artificial Sequence
  source: /note="Description of Artificial Sequence: Synthetic oligonucleotide"
ttgtccagccgcaggcagca

SEQ ID NO: 2003 - DNA, 20 bp, Artificial Sequence
  source: /note="Description of Artificial Sequence: Synthetic oligonucleotide"
cttgtccagccgcaggcagc

SEQ ID NO: 2004 - DNA, 20 bp, Artificial Sequence
  source: /note="Description of Artificial Sequence: Synthetic oligonucleotide"
ccttgtccagccgcaggcag

SEQ ID NO: 2005 - DNA, 20 bp, Artificial Sequence
  source: /note="Description of Artificial Sequence: Synthetic oligonucleotide"
cccttgtccagccgcaggca

SEQ ID NO: 2006 - DNA, 20 bp, Artificial Sequence
  source: /note="Description of Artificial Sequence: Synthetic oligonucleotide"
gcccttgtccagccgcaggc

SEQ ID NO: 2007 - DNA, 20 bp, Artificial Sequence
  source: /note="Description of Artificial Sequence: Synthetic oligonucleotide"
agcccttgtccagccgcagg

SEQ ID NO: 2008 - DNA, 20 bp, Artificial Sequence
  source: /note="Description of Artificial Sequence: Synthetic oligonucleotide"
cagcccttgtccagccgcag

SEQ ID NO: 2009 - DNA, 20 bp, Artificial Sequence
  source: /note="Description of Artificial Sequence: Synthetic oligonucleotide"
gcagcccttgtccagccgca

SEQ ID NO: 2010 - DNA, 20 bp, Artificial Sequence
  source: /note="Description of Artificial Sequence: Synthetic oligonucleotide"
tgcagcccttgtccagccgc

SEQ ID NO: 2011 - DNA, 20 bp, Artificial Sequence
  source: /note="Description of Artificial Sequence: Synthetic oligonucleotide"
ttgcagcccttgtccagccg

SEQ ID NO: 2012 - DNA, 20 bp, Artificial Sequence
  source: /note="Description of Artificial Sequence: Synthetic oligonucleotide"
cttgcagcccttgtccagcc

SEQ ID NO: 2013 - DNA, 20 bp, Artificial Sequence
  source: /note="Description of Artificial Sequence: Synthetic oligonucleotide"
gcttgcagcccttgtccagc

SEQ ID NO: 2014 - DNA, 20 bp, Artificial Sequence
  source: /note="Description of Artificial Sequence: Synthetic oligonucleotide"
tgcttgcagcccttgtccag

SEQ ID NO: 2015 - DNA, 20 bp, Artificial Sequence
  source: /note="Description of Artificial Sequence: Synthetic oligonucleotide"
gtgcttgcagcccttgtcca

SEQ ID NO: 2016 - DNA, 20 bp, Artificial Sequence
  source: /note="Description of Artificial Sequence: Synthetic oligonucleotide"
ttgtgcttgcagcccttgtc

SEQ ID NO: 2017 - DNA, 20 bp, Artificial Sequence
  source: /note="Description of Artificial Sequence: Synthetic oligonucleotide"
gttgtgcttgcagcccttgt

SEQ ID NO: 2018 - DNA, 20 bp, Artificial Sequence
  source: /note="Description of Artificial Sequence: Synthetic oligonucleotide"
tgttgtgcttgcagcccttg

SEQ ID NO: 2019 - DNA, 20 bp, Artificial Sequence
  source: /note="Description of Artificial Sequence: Synthetic oligonucleotide"
ctgttgtgcttgcagccctt

SEQ ID NO: 2020 - DNA, 20 bp, Artificial Sequence
  source: /note="Description of Artificial Sequence: Synthetic oligonucleotide"
gctgttgtgcttgcagccct

SEQ ID NO: 2021 - DNA, 20 bp, Artificial Sequence
  source: /note="Description of Artificial Sequence: Synthetic oligonucleotide"
agctgttgtgcttgcagccc

SEQ ID NO: 2022 - DNA, 20 bp, Artificial Sequence
  source: /note="Description of Artificial Sequence: Synthetic oligonucleotide"
tagctgttgtgcttgcagcc

SEQ ID NO: 2023 - DNA, 20 bp, Artificial Sequence
  source: /note="Description of Artificial Sequence: Synthetic oligonucleotide"
atagctgttgtgcttgcagc

SEQ ID NO: 2024 - DNA, 20 bp, Artificial Sequence
  source: /note="Description of Artificial Sequence: Synthetic oligonucleotide"
catagctgttgtgcttgcag

SEQ ID NO: 2025 - DNA, 20 bp, Artificial Sequence
  source: /note="Description of Artificial Sequence: Synthetic oligonucleotide"
tcatagctgttgtgcttgca

SEQ ID NO: 2026 - DNA, 20 bp, Artificial Sequence
  source: /note="Description of Artificial Sequence: Synthetic oligonucleotide"
ttcatagctgttgtgcttgc

SEQ ID NO: 2027 - DNA, 20 bp, Artificial Sequence
  source: /note="Description of Artificial Sequence: Synthetic oligonucleotide"
cttcatagctgttgtgcttg

SEQ ID NO: 2028 - DNA, 20 bp, Artificial Sequence
  source: /note="Description of Artificial Sequence: Synthetic oligonucleotide"
tcttcatagctgttgtgctt

SEQ ID NO: 2029 - DNA, 20 bp, Artificial Sequence
  source: /note="Description of Artificial Sequence: Synthetic oligonucleotide"
gtcttcatagctgttgtgct

SEQ ID NO: 2030 - DNA, 20 bp, Artificial Sequence
  source: /note="Description of Artificial Sequence: Synthetic oligonucleotide"
cgtcttcatagctgttgtgc

SEQ ID NO: 2031 - DNA, 20 bp, Artificial Sequence
  source: /note="Description of Artificial Sequence: Synthetic oligonucleotide"
ggcgtcttcatagctgttgt

SEQ ID NO: 2032 - DNA, 20 bp, Artificial Sequence
  source: /note="Description of Artificial Sequence: Synthetic oligonucleotide"
tggcgtcttcatagctgttg

SEQ ID NO: 2033 - DNA, 20 bp, Artificial Sequence
  source: /note="Description of Artificial Sequence: Synthetic oligonucleotide"
ttggcgtcttcatagctgtt

SEQ ID NO: 2034 - DNA, 20 bp, Artificial Sequence
  source: /note="Description of Artificial Sequence: Synthetic oligonucleotide"
cttggcgtcttcatagctgt

SEQ ID NO: 2035 - DNA, 20 bp, Artificial Sequence
  source: /note="Description of Artificial Sequence: Synthetic oligonucleotide"
ccttggcgtcttcatagctg

SEQ ID NO: 2036 - DNA, 20 bp, Artificial Sequence
  source: /note="Description of Artificial Sequence: Synthetic oligonucleotide"
gccttggcgtcttcatagct

SEQ ID NO: 2037 - DNA, 20 bp, Artificial Sequence
  source: /note="Description of Artificial Sequence: Synthetic oligonucleotide"
ggccttggcgtcttcatagc

SEQ ID NO: 2038 - DNA, 20 bp, Artificial Sequence
  source: /note="Description of Artificial Sequence: Synthetic oligonucleotide"
aggccttggcgtcttcatag

SEQ ID NO: 2039 - DNA, 20 bp, Artificial Sequence
  source: /note="Description of Artificial Sequence: Synthetic oligonucleotide"
gtaggccttggcgtcttcat

SEQ ID NO: 2040 - DNA, 20 bp, Artificial Sequence
  source: /note="Description of Artificial Sequence: Synthetic oligonucleotide"
cgtaggccttggcgtcttca

SEQ ID NO: 2041 - DNA, 20 bp, Artificial Sequence
  source: /note="Description of Artificial Sequence: Synthetic oligonucleotide"
ccgtaggccttggcgtcttc

SEQ ID NO: 2042 - DNA, 20 bp, Artificial Sequence
  source: /note="Description of Artificial Sequence: Synthetic oligonucleotide"
cccgtaggccttggcgtctt

SEQ ID NO: 2043 - DNA, 20 bp, Artificial Sequence
  source: /note="Description of Artificial Sequence: Synthetic oligonucleotide"
acccgtaggccttggcgtct

SEQ ID NO: 2044 - DNA, 20 bp, Artificial Sequence
  source: /note="Description of Artificial Sequence: Synthetic oligonucleotide"
aacccgtaggccttggcgtc

SEQ ID NO: 2045 - DNA, 20 bp, Artificial Sequence
  source: /note="Description of Artificial Sequence: Synthetic oligonucleotide"
gaacccgtaggccttggcgt

SEQ ID NO: 2046 - DNA, 20 bp, Artificial Sequence
  source: /note="Description of Artificial Sequence: Synthetic oligonucleotide"
tgaacccgtaggccttggcg

SEQ ID NO: 2047 - DNA, 20 bp, Artificial Sequence
  source: /note="Description of Artificial Sequence: Synthetic oligonucleotide"
ttgaacccgtaggccttggc

SEQ ID NO: 2048 - DNA, 20 bp, Artificial Sequence
  source: /note="Description of Artificial Sequence: Synthetic oligonucleotide"
cttgaacccgtaggccttgg

SEQ ID NO: 2049 - DNA, 20 bp, Artificial Sequence
  source: /note="Description of Artificial Sequence: Synthetic oligonucleotide"
tcttgaacccgtaggccttg

SEQ ID NO: 2050 - DNA, 20 bp, Artificial Sequence
  source: /note="Description of Artificial Sequence: Synthetic oligonucleotide"
ttcttgaacccgtaggcctt

SEQ ID NO: 2051 - DNA, 20 bp, Artificial Sequence
  source: /note="Description of Artificial Sequence: Synthetic oligonucleotide"
gttcttgaacccgtaggcct

SEQ ID NO: 2052 - DNA, 20 bp, Artificial Sequence
  source: /note="Description of Artificial Sequence: Synthetic oligonucleotide"
tgttcttgaacccgtaggcc

SEQ ID NO: 2053 - DNA, 20 bp, Artificial Sequence
  source: /note="Description of Artificial Sequence: Synthetic oligonucleotide"
cttgttcttgaacccgtagg

SEQ ID NO: 2054 - DNA, 20 bp, Artificial Sequence
  source: /note="Description of Artificial Sequence: Synthetic oligonucleotide"
gcttgttcttgaacccgtag

SEQ ID NO: 2055 - DNA, 20 bp, Artificial Sequence
  source: /note="Description of Artificial Sequence: Synthetic oligonucleotide"
agcttgttcttgaacccgta

SEQ ID NO: 2056 - DNA, 20 bp, Artificial Sequence
  source: /note="Description of Artificial Sequence: Synthetic oligonucleotide"
cagcttgttcttgaacccgt

SEQ ID NO: 2057 - DNA, 20 bp, Artificial Sequence
  source: /note="Description of Artificial Sequence: Synthetic oligonucleotide"
tcagcttgttcttgaacccg

SEQ ID NO: 2058 - DNA, 20 bp, Artificial Sequence
  source: /note="Description of Artificial Sequence: Synthetic oligonucleotide"
atcagcttgttcttgaaccc

SEQ ID NO: 2059 - DNA, 20 bp, Artificial Sequence
  source: /note="Description of Artificial Sequence: Synthetic oligonucleotide"
gatcagcttgttcttgaacc

SEQ ID NO: 2060 - DNA, 20 bp, Artificial Sequence
  source: /note="Description of Artificial Sequence: Synthetic oligonucleotide"
tgatcagcttgttcttgaac

SEQ ID NO: 2061 - DNA, 20 bp, Artificial Sequence
  source: /note="Description of Artificial Sequence: Synthetic oligonucleotide"
atgatcagcttgttcttgaa

SEQ ID NO: 2062 - DNA, 20 bp, Artificial Sequence
  source: /note="Description of Artificial Sequence: Synthetic oligonucleotide"
gatgatcagcttgttcttga

SEQ ID NO: 2063 - DNA, 20 bp, Artificial Sequence
  source: /note="Description of Artificial Sequence: Synthetic oligonucleotide"
cgatgatcagcttgttcttg

SEQ ID NO: 2064 - DNA, 20 bp, Artificial Sequence
  source: /note="Description of Artificial Sequence: Synthetic oligonucleotide"
acgatgatcagcttgttctt

SEQ ID NO: 2065 - DNA, 20 bp, Artificial Sequence
  source: /note="Description of Artificial Sequence: Synthetic oligonucleotide"
gacgatgatcagcttgttct

SEQ ID NO: 2066 - DNA, 20 bp, Artificial Sequence
  source: /note="Description of Artificial Sequence: Synthetic oligonucleotide"
agacgatgatcagcttgttc

SEQ ID NO: 2067 - DNA, 20 bp, Artificial Sequence
  source: /note="Description of Artificial Sequence: Synthetic oligonucleotide"
gagacgatgatcagcttgtt

SEQ ID NO: 2068 - DNA, 20 bp, Artificial Sequence
  source: /note="Description of Artificial Sequence: Synthetic oligonucleotide"
cgagacgatgatcagcttgt

SEQ ID NO: 2069 - DNA, 20 bp, Artificial Sequence
  source: /note="Description of Artificial Sequence: Synthetic oligonucleotide"
ccgagacgatgatcagcttg

SEQ ID NO: 2070 - DNA, 20 bp, Artificial Sequence
  source: /note="Description of Artificial Sequence: Synthetic oligonucleotide"
gccgagacgatgatcagctt

SEQ ID NO: 2071 - DNA, 20 bp, Artificial Sequence
  source: /note="Description of Artificial Sequence: Synthetic oligonucleotide"
tgccgagacgatgatcagct

SEQ ID NO: 2072 - DNA, 20 bp, Artificial Sequence
  source: /note="Description of Artificial Sequence: Synthetic oligonucleotide"
ctgccgagacgatgatcagc

SEQ ID NO: 2073 - DNA, 20 bp, Artificial Sequence
  source: /note="Description of Artificial Sequence: Synthetic oligonucleotide"
tctgccgagacgatgatcag

SEQ ID NO: 2074 - DNA, 20 bp, Artificial Sequence
  source: /note="Description of Artificial Sequence: Synthetic oligonucleotide"
ctctgccgagacgatgatca

SEQ ID NO: 2075 - DNA, 20 bp, Artificial Sequence
  source: /note="Description of Artificial Sequence: Synthetic oligonucleotide"
gtctctgccgagacgatgat

SEQ ID NO: 2076 - DNA, 20 bp, Artificial Sequence
  source: /note="Description of Artificial Sequence: Synthetic oligonucleotide"
cgtctctgccgagacgatga

SEQ ID NO: 2077 - DNA, 20 bp, Artificial Sequence
  source: /note="Description of Artificial Sequence: Synthetic oligonucleotide"
ccgtctctgccgagacgatg

SEQ ID NO: 2078 - DNA, 20 bp, Artificial Sequence
  source: /note="Description of Artificial Sequence: Synthetic oligonucleotide"
gccgtctctgccgagacgat

SEQ ID NO: 2079 - DNA, 20 bp, Artificial Sequence
  source: /note="Description of Artificial Sequence: Synthetic oligonucleotide"
ggccgtctctgccgagacga

SEQ ID NO: 2080 - DNA, 20 bp, Artificial Sequence
  source: /note="Description of Artificial Sequence: Synthetic oligonucleotide"
gttgtacagcccattgccgg

SEQ ID NO: 2081 - DNA, 20 bp, Artificial Sequence
  source: /note="Description of Artificial Sequence: Synthetic oligonucleotide"
agttgtacagcccattgccg

SEQ ID NO: 2082 - DNA, 20 bp, Artificial Sequence
  source: /note="Description of Artificial Sequence: Synthetic oligonucleotide"
aagttgtacagcccattgcc

SEQ ID NO: 2083 - DNA, 20 bp, Artificial Sequence
  source: /note="Description of Artificial Sequence: Synthetic oligonucleotide"
gaagttgtacagcccattgc

SEQ ID NO: 2084 - DNA, 20 bp, Artificial Sequence
  source: /note="Description of Artificial Sequence: Synthetic oligonucleotide"
tgaagttgtacagcccattg

SEQ ID NO: 2085 - DNA, 20 bp, Artificial Sequence
  source: /note="Description of Artificial Sequence: Synthetic oligonucleotide"
atgaagttgtacagcccatt

SEQ ID NO: 2086 - DNA, 20 bp, Artificial Sequence
  source: /note="Description of Artificial Sequence: Synthetic oligonucleotide"
gatgaagttgtacagcccat

SEQ ID NO: 2087 - DNA, 20 bp, Artificial Sequence
  source: /note="Description of Artificial Sequence: Synthetic oligonucleotide"
cgatgaagttgtacagccca

SEQ ID NO: 2088 - DNA, 20 bp, Artificial Sequence
  source: /note="Description of Artificial Sequence: Synthetic oligonucleotide"
acgatgaagttgtacagccc

SEQ ID NO: 2089 - DNA, 20 bp, Artificial Sequence
  source: /note="Description of Artificial Sequence: Synthetic oligonucleotide"
cacgatgaagttgtacagcc

SEQ ID NO: 2090 - DNA, 20 bp, Artificial Sequence
  source: /note="Description of Artificial Sequence: Synthetic oligonucleotide"
gcacgatgaagttgtacagc

SEQ ID NO: 2091 - DNA, 20 bp, Artificial Sequence
  source: /note="Description of Artificial Sequence: Synthetic oligonucleotide"
ggcacgatgaagttgtacag

SEQ ID NO: 2092 - DNA, 20 bp, Artificial Sequence
  source: /note="Description of Artificial Sequence: Synthetic oligonucleotide"
tggcacgatgaagttgtaca

SEQ ID NO: 2093 - DNA, 20 bp, Artificial Sequence
  source: /note="Description of Artificial Sequence: Synthetic oligonucleotide"
gtggcacgatgaagttgtac

SEQ ID NO: 2094 - DNA, 20 bp, Artificial Sequence
  source: /note="Description of Artificial Sequence: Synthetic oligonucleotide"
agtggcacgatgaagttgta

SEQ ID NO: 2095 - DNA, 20 bp, Artificial Sequence
  source: /note="Description of Artificial Sequence: Synthetic oligonucleotide"
cagtggcacgatgaagttgt

SEQ ID NO: 2096 - DNA, 20 bp, Artificial Sequence
  source: /note="Description of Artificial Sequence: Synthetic oligonucleotide"
gcagtggcacgatgaagttg

SEQ ID NO: 2097 - DNA, 20 bp, Artificial Sequence
  source: /note="Description of Artificial Sequence: Synthetic oligonucleotide"
cgcagtggcacgatgaagtt

SEQ ID NO: 2098 - DNA, 20 bp, Artificial Sequence
  source: /note="Description of Artificial Sequence: Synthetic oligonucleotide"
ccgcagtggcacgatgaagt

SEQ ID NO: 2099 - DNA, 20 bp, Artificial Sequence
  source: /note="Description of Artificial Sequence: Synthetic oligonucleotide"
cccgcagtggcacgatgaag

SEQ ID NO: 2100 - DNA, 20 bp, Artificial Sequence
  source: /note="Description of Artificial Sequence: Synthetic oligonucleotide"
gcccgcagtggcacgatgaa

SEQ ID NO: 2101 - DNA, 20 bp, Artificial Sequence
  source: /note="Description of Artificial Sequence: Synthetic oligonucleotide"
ggcccgcagtggcacgatga

SEQ ID NO: 2102 - DNA, 20 bp, Artificial Sequence
  source: /note="Description of Artificial Sequence: Synthetic oligonucleotide"
aggcccgcagtggcacgatg

SEQ ID NO: 2103 - DNA, 20 bp, Artificial Sequence
  source: /note="Description of Artificial Sequence: Synthetic oligonucleotide"
taggcccgcagtggcacgat

SEQ ID NO: 2104 - DNA, 20 bp, Artificial Sequence
  source: /note="Description of Artificial Sequence: Synthetic oligonucleotide"
gtaggcccgcagtggcacga

SEQ ID NO: 2105 - DNA, 20 bp, Artificial Sequence
  source: /note="Description of Artificial Sequence: Synthetic oligonucleotide"
agtaggcccgcagtggcacg

SEQ ID NO: 2106 - DNA, 20 bp, Artificial Sequence
  source: /note="Description of Artificial Sequence: Synthetic oligonucleotide"
tagtaggcccgcagtggcac

SEQ ID NO: 2107 - DNA, 20 bp, Artificial Sequence
  source: /note="Description of Artificial Sequence: Synthetic oligonucleotide"
gtagtaggcccgcagtggca

SEQ ID NO: 2108 - DNA, 20 bp, Artificial Sequence
  source: /note="Description of Artificial Sequence: Synthetic oligonucleotide"
tgtagtaggcccgcagtggc

SEQ ID NO: 2109 - DNA, 20 bp, Artificial Sequence
  source: /note="Description of Artificial Sequence: Synthetic oligonucleotide"
ctgtagtaggcccgcagtgg

SEQ ID NO: 2110 - DNA, 20 bp, Artificial Sequence
  source: /note="Description of Artificial Sequence: Synthetic oligonucleotide"
tctgtagtaggcccgcagtg

SEQ ID NO: 2111 - DNA, 20 bp, Artificial Sequence
  source: /note="Description of Artificial Sequence: Synthetic oligonucleotide"
atctgtagtaggcccgcagt

SEQ ID NO: 2112 - DNA, 20 bp, Artificial Sequence
  source: /note="Description of Artificial Sequence: Synthetic oligonucleotide"
gatctgtagtaggcccgcag

SEQ ID NO: 2113 - DNA, 20 bp, Artificial Sequence
  source: /note="Description of Artificial Sequence: Synthetic oligonucleotide"
ggatctgtagtaggcccgca

SEQ ID NO: 2114 - DNA, 20 bp, Artificial Sequence
  source: /note="Description of Artificial Sequence: Synthetic oligonucleotide"
gggatctgtagtaggcccgc

SEQ ID NO: 2115 - DNA, 20 bp, Artificial Sequence
  source: /note="Description of Artificial Sequence: Synthetic oligonucleotide"
cgggatctgtagtaggcccg

SEQ ID NO: 2116 - DNA, 20 bp, Artificial Sequence
  source: /note="Description of Artificial Sequence: Synthetic oligonucleotide"
gcgggatctgtagtaggccc

SEQ ID NO: 2117 - DNA, 20 bp, Artificial Sequence
  source: /note="Description of Artificial Sequence: Synthetic oligonucleotide"
tgcgggatctgtagtaggcc

SEQ ID NO: 2118 - DNA, 20 bp, Artificial Sequence
  source: /note="Description of Artificial Sequence: Synthetic oligonucleotide"
cttgcgggatctgtagtagg

SEQ ID NO: 2119 - DNA, 20 bp, Artificial Sequence
  source: /note="Description of Artificial Sequence: Synthetic oligonucleotide"
ccttgcgggatctgtagtag

SEQ ID NO: 2120 - DNA, 20 bp, Artificial Sequence
  source: /note="Description of Artificial Sequence: Synthetic oligonucleotide"
tccttgcgggatctgtagta

SEQ ID NO: 2121 - DNA, 20 bp, Artificial Sequence
  source: /note="Description of Artificial Sequence: Synthetic oligonucleotide"
ctccttgcgggatctgtagt

SEQ ID NO: 2122 - DNA, 20 bp, Artificial Sequence
  source: /note="Description of Artificial Sequence: Synthetic oligonucleotide"
gctccttgcgggatctgtag

SEQ ID NO: 2123 - DNA, 20 bp, Artificial Sequence
  source: /note="Description of Artificial Sequence: Synthetic oligonucleotide"
agctccttgcgggatctgta

SEQ ID NO: 2124 - DNA, 20 bp, Artificial Sequence
  source: /note="Description of Artificial Sequence: Synthetic oligonucleotide"
cagctccttgcgggatctgt

SEQ ID NO: 2125 - DNA, 20 bp, Artificial Sequence
  source: /note="Description of Artificial Sequence: Synthetic oligonucleotide"
tcagctccttgcgggatctg

SEQ ID NO: 2126 - DNA, 20 bp, Artificial Sequence
  source: /note="Description of Artificial Sequence: Synthetic oligonucleotide"
ttcagctccttgcgggatct

SEQ ID NO: 2127 - DNA, 20 bp, Artificial Sequence
  source: /note="Description of Artificial Sequence: Synthetic oligonucleotide"
gttcagctccttgcgggatc

SEQ ID NO: 2128 - DNA, 20 bp, Artificial Sequence
  source: /note="Description of Artificial Sequence: Synthetic oligonucleotide"
ggttcagctccttgcgggat

SEQ ID NO: 2129 - DNA, 20 bp, Artificial Sequence
  source: /note="Description of Artificial Sequence: Synthetic oligonucleotide"
gggttcagctccttgcggga

SEQ ID NO: 2130 - DNA, 20 bp, Artificial Sequence
  source: /note="Description of Artificial Sequence: Synthetic oligonucleotide"
tccagcagcagcacgatggg

SEQ ID NO: 2131 - DNA, 20 bp, Artificial Sequence
  source: /note="Description of Artificial Sequence: Synthetic oligonucleotide"
gtccagcagcagcacgatgg

SEQ ID NO: 2132 - DNA, 20 bp, Artificial Sequence
  source: /note="Description of Artificial Sequence: Synthetic oligonucleotide"
tgtccagcagcagcacgatg

SEQ ID NO: 2133 - DNA, 20 bp, Artificial Sequence
  source: /note="Description of Artificial Sequence: Synthetic oligonucleotide"
ttgtccagcagcagcacgat

SEQ ID NO: 2134 - DNA, 20 bp, Artificial Sequence
  source: /note="Description of Artificial Sequence: Synthetic oligonucleotide"
gttgtccagcagcagcacga

SEQ ID NO: 2135 - DNA, 20 bp, Artificial Sequence
  source: /note="Description of Artificial Sequence: Synthetic oligonucleotide"
tgttgtccagcagcagcacg

SEQ ID NO: 2136 - DNA, 20 bp, Artificial Sequence
  source: /note="Description of Artificial Sequence: Synthetic oligonucleotide"
ttgttgtccagcagcagcac

SEQ ID NO: 2137 - DNA, 20 bp, Artificial Sequence
  source: /note="Description of Artificial Sequence: Synthetic oligonucleotide"
cttgttgtccagcagcagca

SEQ ID NO: 2138 - DNA, 20 bp, Artificial Sequence
  source: /note="Description of Artificial Sequence: Synthetic oligonucleotide"
gcttgttgtccagcagcagc

SEQ ID NO: 2139 - DNA, 20 bp, Artificial Sequence
  source: /note="Description of Artificial Sequence: Synthetic oligonucleotide"
ggcttgttgtccagcagcag

SEQ ID NO: 2140 - DNA, 20 bp, Artificial Sequence
  source: /note="Description of Artificial Sequence: Synthetic oligonucleotide"
gggcttgttgtccagcagca

SEQ ID NO: 2141 - DNA, 20 bp, Artificial Sequence
  source: /note="Description of Artificial Sequence: Synthetic oligonucleotide"
cgggcttgttgtccagcagc

SEQ ID NO: 2142 - DNA, 20 bp, Artificial Sequence
  source: /note="Description of Artificial Sequence: Synthetic oligonucleotide"
tcgggcttgttgtccagcag

SEQ ID NO: 2143 - DNA, 20 bp, Artificial Sequence
  source: /note="Description of Artificial Sequence: Synthetic oligonucleotide"
gtcgggcttgttgtccagca

SEQ ID NO: 2144 - DNA, 20 bp, Artificial Sequence
  source: /note="Description of Artificial Sequence: Synthetic oligonucleotide"
ggtcgggcttgttgtccagc

SEQ ID NO: 2145 - DNA, 20 bp, Artificial Sequence
  source: /note="Description of Artificial Sequence: Synthetic oligonucleotide"
tggtcgggcttgttgtccag

SEQ ID NO: 2146 - DNA, 20 bp, Artificial Sequence
  source: /note="Description of Artificial Sequence: Synthetic oligonucleotide"
gtggtcgggcttgttgtcca

SEQ ID NO: 2147 - DNA, 20 bp, Artificial Sequence
  source: /note="Description of Artificial Sequence: Synthetic oligonucleotide"
ggtggtcgggcttgttgtcc

SEQ ID NO: 2148 - DNA, 20 bp, Artificial Sequence
  source: /note="Description of Artificial Sequence: Synthetic oligonucleotide"
tggtggtcgggcttgttgtc

SEQ ID NO: 2149 - DNA, 20 bp, Artificial Sequence
  source: /note="Description of Artificial Sequence: Synthetic oligonucleotide"
gtggtggtcgggcttgttgt

SEQ ID NO: 2150 - DNA, 20 bp, Artificial Sequence
  source: /note="Description of Artificial Sequence: Synthetic oligonucleotide"
agtggtggtcgggcttgttg

SEQ ID NO: 2151 - DNA, 20 bp, Artificial Sequence
  source: /note="Description of Artificial Sequence: Synthetic oligonucleotide"
aagtggtggtcgggcttgtt

SEQ ID NO: 2152 - DNA, 20 bp, Artificial Sequence
  source: /note="Description of Artificial Sequence: Synthetic oligonucleotide"
gaagtggtggtcgggcttgt

SEQ ID NO: 2153 - DNA, 20 bp, Artificial Sequence
  source: /note="Description of Artificial Sequence: Synthetic oligonucleotide"
ggaagtggtggtcgggcttg

SEQ ID NO: 2154 - DNA, 20 bp, Artificial Sequence
  source: /note="Description of Artificial Sequence: Synthetic oligonucleotide"
aggaagtggtggtcgggctt

SEQ ID NO: 2155 - DNA, 20 bp, Artificial Sequence
  source: /note="Description of Artificial Sequence: Synthetic oligonucleotide"
caggaagtggtggtcgggct

SEQ ID NO: 2156 - DNA, 20 bp, Artificial Sequence
  source: /note="Description of Artificial Sequence: Synthetic oligonucleotide"
ccaggaagtggtggtcgggc

SEQ ID NO: 2157 - DNA, 20 bp, Artificial Sequence
  source: /note="Description of Artificial Sequence: Synthetic oligonucleotide"
tccaggaagtggtggtcggg

SEQ ID NO: 2158 - DNA, 20 bp, Artificial Sequence
  source: /note="Description of Artificial Sequence: Synthetic oligonucleotide"
ttccaggaagtggtggtcgg

SEQ ID NO: 2159 - DNA, 20 bp, Artificial Sequence
  source: /note="Description of Artificial Sequence: Synthetic oligonucleotide"
cttccaggaagtggtggtcg

SEQ ID NO: 2160 - DNA, 20 bp, Artificial Sequence
  source: /note="Description of Artificial Sequence: Synthetic oligonucleotide"
gcttccaggaagtggtggtc

SEQ ID NO: 2161 - DNA, 20 bp, Artificial Sequence
  source: /note="Description of Artificial Sequence: Synthetic oligonucleotide"
ggcttccaggaagtggtggt

SEQ ID NO: 2162 - DNA, 20 bp, Artificial Sequence
  source: /note="Description of Artificial Sequence: Synthetic oligonucleotide"
tggcttccaggaagtggtgg

SEQ ID NO: 2163 - DNA, 20 bp, Artificial Sequence
  source: /note="Description of Artificial Sequence: Synthetic oligonucleotide"
atggcttccaggaagtggtg

SEQ ID NO: 2164 - DNA, 20 bp, Artificial Sequence
  source: /note="Description of Artificial Sequence: Synthetic oligonucleotide"
gatggcttccaggaagtggt

SEQ ID NO: 2165 - DNA, 20 bp, Artificial Sequence
  source: /note="Description of Artificial Sequence: Synthetic oligonucleotide"
agatggcttccaggaagtgg

SEQ ID NO: 2166 - DNA, 20 bp, Artificial Sequence
  source: /note="Description of Artificial Sequence: Synthetic oligonucleotide"
cagatggcttccaggaagtg

SEQ ID NO: 2167 - DNA, 20 bp, Artificial Sequence
  source: /note="Description of Artificial Sequence: Synthetic oligonucleotide"
gcagatggcttccaggaagt

SEQ ID NO: 2168 - DNA, 20 bp, Artificial Sequence
  source: /note="Description of Artificial Sequence: Synthetic oligonucleotide"
agcagatggcttccaggaag

SEQ ID NO: 2169 - DNA, 20 bp, Artificial Sequence
  source: /note="Description of Artificial Sequence: Synthetic oligonucleotide"
cagcagatggcttccaggaa

SEQ ID NO: 2170 - DNA, 20 bp, Artificial Sequence
  source: /note="Description of Artificial Sequence: Synthetic oligonucleotide"
gcagcagatggcttccagga

SEQ ID NO: 2171 - DNA, 20 bp, Artificial Sequence
  source: /note="Description of Artificial Sequence: Synthetic oligonucleotide"
agcagcagatggcttccagg

SEQ ID NO: 2172 - DNA, 20 bp, Artificial Sequence
  source: /note="Description of Artificial Sequence: Synthetic oligonucleotide"
aagcagcagatggcttccag

SEQ ID NO: 2173 - DNA, 20 bp, Artificial Sequence
  source: /note="Description of Artificial Sequence: Synthetic oligonucleotide"
gaagcagcagatggcttcca

SEQ ID NO: 2174 - DNA, 20 bp, Artificial Sequence
  source: /note="Description of Artificial Sequence: Synthetic oligonucleotide"
ggaagcagcagatggcttcc

SEQ ID NO: 2175 - DNA, 20 bp, Artificial Sequence
  source: /note="Description of Artificial Sequence: Synthetic oligonucleotide"
gggaagcagcagatggcttc

SEQ ID NO: 2176 - DNA, 20 bp, Artificial Sequence
  source: /note="Description of Artificial Sequence: Synthetic oligonucleotide"
tccatgtagtagaccatggg

SEQ ID NO: 2177 - DNA, 20 bp, Artificial Sequence
  source: /note="Description of Artificial Sequence: Synthetic oligonucleotide"
ctccatgtagtagaccatgg

SEQ ID NO: 2178 - DNA, 20 bp, Artificial Sequence
  source: /note="Description of Artificial Sequence: Synthetic oligonucleotide"
cctccatgtagtagaccatg

SEQ ID NO: 2179 - DNA, 20 bp, Artificial Sequence
  source: /note="Description of Artificial Sequence: Synthetic oligonucleotide"
ccctccatgtagtagaccat

SEQ ID NO: 2180 - DNA, 20 bp, Artificial Sequence
  source: /note="Description of Artificial Sequence: Synthetic oligonucleotide"
gccctccatgtagtagacca

SEQ ID NO: 2181 - DNA, 20 bp, Artificial Sequence
  source: /note="Description of Artificial Sequence: Synthetic oligonucleotide"
agccctccatgtagtagacc

SEQ ID NO: 2182 - DNA, 20 bp, Artificial Sequence
  source: /note="Description of Artificial Sequence: Synthetic oligonucleotide"
gagccctccatgtagtagac

SEQ ID NO: 2183 - DNA, 20 bp, Artificial Sequence
  source: /note="Description of Artificial Sequence: Synthetic oligonucleotide"
agagccctccatgtagtaga

SEQ ID NO: 2184 - DNA, 20 bp, Artificial Sequence
  source: /note="Description of Artificial Sequence: Synthetic oligonucleotide"
cagagccctccatgtagtag

SEQ ID NO: 2185 - DNA, 20 bp, Artificial Sequence
  source: /note="Description of Artificial Sequence: Synthetic oligonucleotide"
acagagccctccatgtagta

SEQ ID NO: 2186 - DNA, 20 bp, Artificial Sequence
  source: /note="Description of Artificial Sequence: Synthetic oligonucleotide"
cacagagccctccatgtagt

SEQ ID NO: 2187 - DNA, 20 bp, Artificial Sequence
  source: /note="Description of Artificial Sequence: Synthetic oligonucleotide"
ccacagagccctccatgtag

SEQ ID NO: 2188 - DNA, 20 bp, Artificial Sequence
  source: /note="Description of Artificial Sequence: Synthetic oligonucleotide"
tccacagagccctccatgta

SEQ ID NO: 2189 - DNA, 20 bp, Artificial Sequence
  source: /note="Description of Artificial Sequence: Synthetic oligonucleotide"
gtccacagagccctccatgt

SEQ ID NO: 2190 - DNA, 20 bp, Artificial Sequence
  source: /note="Description of Artificial Sequence: Synthetic oligonucleotide"
tgtccacagagccctccatg

SEQ ID NO: 2191 - DNA, 20 bp, Artificial Sequence
  source: /note="Description of Artificial Sequence: Synthetic oligonucleotide"
ttgtccacagagccctccat

SEQ ID NO: 2192 - DNA, 20 bp, Artificial Sequence
  source: /note="Description of Artificial Sequence: Synthetic oligonucleotide"
gttgtccacagagccctcca

SEQ ID NO: 2193 - DNA, 20 bp, Artificial Sequence
  source: /note="Description of Artificial Sequence: Synthetic oligonucleotide"
ggttgtccacagagccctcc

SEQ ID NO: 2194 - DNA, 20 bp, Artificial Sequence
  source: /note="Description of Artificial Sequence: Synthetic oligonucleotide"
aggttgtccacagagccctc

SEQ ID NO: 2195 - DNA, 20 bp, Artificial Sequence
  source: /note="Description of Artificial Sequence: Synthetic oligonucleotide"
caggttgtccacagagccct

SEQ ID NO: 2196 - DNA, 20 bp, Artificial Sequence
  source: /note="Description of Artificial Sequence: Synthetic oligonucleotide"
ccaggttgtccacagagccc

SEQ ID NO: 2197 - DNA, 20 bp, Artificial Sequence
  source: /note="Description of Artificial Sequence: Synthetic oligonucleotide"
tccaggttgtccacagagcc

SEQ ID NO: 2198 - DNA, 20 bp, Artificial Sequence
  source: /note="Description of Artificial Sequence: Synthetic oligonucleotide"
gtccaggttgtccacagagc

SEQ ID NO: 2199 - DNA, 20 bp, Artificial Sequence
  source: /note="Description of Artificial Sequence: Synthetic oligonucleotide"
tgtccaggttgtccacagag

SEQ ID NO: 2200 - DNA, 20 bp, Artificial Sequence
  source: /note="Description of Artificial Sequence: Synthetic oligonucleotide"
ctgtccaggttgtccacaga

SEQ ID NO: 2201 - DNA, 20 bp, Artificial Sequence
  source: /note="Description of Artificial Sequence: Synthetic oligonucleotide"
gctgtccaggttgtccacag

SEQ ID NO: 2202 - DNA, 20 bp, Artificial Sequence
  source: /note="Description of Artificial Sequence: Synthetic oligonucleotide"
ggctgtccaggttgtccaca

SEQ ID NO: 2203 - DNA, 20 bp, Artificial Sequence
  source: /note="Description of Artificial Sequence: Synthetic oligonucleotide"
aggctgtccaggttgtccac

SEQ ID NO: 2204 - DNA, 20 bp, Artificial Sequence
  source: /note="Description of Artificial Sequence: Synthetic oligonucleotide"
caggctgtccaggttgtcca

SEQ ID NO: 2205 - DNA, 20 bp, Artificial Sequence
  source: /note="Description of Artificial Sequence: Synthetic oligonucleotide"
gcaggctgtccaggttgtcc

SEQ ID NO: 2206 - DNA, 20 bp, Artificial Sequence
  source: /note="Description of Artificial Sequence: Synthetic oligonucleotide"
agcaggctgtccaggttgtc

SEQ ID NO: 2207 - DNA, 20 bp, Artificial Sequence
  source: /note="Description of Artificial Sequence: Synthetic oligonucleotide"
cagcaggctgtccaggttgt

SEQ ID NO: 2208 - DNA, 20 bp, Artificial Sequence
  source: /note="Description of Artificial Sequence: Synthetic oligonucleotide"
gcagcaggctgtccaggttg

SEQ ID NO: 2209 - DNA, 20 bp, Artificial Sequence
  source: /note="Description of Artificial Sequence: Synthetic oligonucleotide"
tgcagcaggctgtccaggtt

SEQ ID NO: 2210 - DNA, 20 bp, Artificial Sequence
  source: /note="Description of Artificial Sequence: Synthetic oligonucleotide"
ctgcagcaggctgtccaggt

SEQ ID NO: 2211 - DNA, 20 bp, Artificial Sequence
  source: /note="Description of Artificial Sequence: Synthetic oligonucleotide"
actgcagcaggctgtccagg

SEQ ID NO: 2212 - DNA, 20 bp, Artificial Sequence
  source: /note="Description of Artificial Sequence: Synthetic oligonucleotide"
cactgcagcaggctgtccag

SEQ ID NO: 2213 - DNA, 20 bp, Artificial Sequence
  source: /note="Description of Artificial Sequence: Synthetic oligonucleotide"
acactgcagcaggctgtcca

SEQ ID NO: 2214 - DNA, 20 bp, Artificial Sequence
  source: /note="Description of Artificial Sequence: Synthetic oligonucleotide"
cacactgcagcaggctgtcc

SEQ ID NO: 2215 - DNA, 20 bp, Artificial Sequence
  source: /note="Description of Artificial Sequence: Synthetic oligonucleotide"
ccacactgcagcaggctgtc

SEQ ID NO: 2216 - DNA, 20 bp, Artificial Sequence
  source: /note="Description of Artificial Sequence: Synthetic oligonucleotide"
gccacactgcagcaggctgt

SEQ ID NO: 2217 - DNA, 20 bp, Artificial Sequence
  source: /note="Description of Artificial Sequence: Synthetic oligonucleotide"
tgccacactgcagcaggctg

SEQ ID NO: 2218 - DNA, 20 bp, Artificial Sequence
  source: /note="Description of Artificial Sequence: Synthetic oligonucleotide"
atgccacactgcagcaggct

SEQ ID NO: 2219 - DNA, 20 bp, Artificial Sequence
  source: /note="Description of Artificial Sequence: Synthetic oligonucleotide"
gatgccacactgcagcaggc

SEQ ID NO: 2220 - DNA, 20 bp, Artificial Sequence
  source: /note="Description of Artificial Sequence: Synthetic oligonucleotide"
tgatgccacactgcagcagg

SEQ ID NO: 2221 - DNA, 20 bp, Artificial Sequence
  source: /note="Description of Artificial Sequence: Synthetic oligonucleotide"
atgatgccacactgcagcag

SEQ ID NO: 2222 - DNA, 20 bp, Artificial Sequence
  source: /note="Description of Artificial Sequence: Synthetic oligonucleotide"
gatgatgccacactgcagca

SEQ ID NO: 2223 - DNA, 20 bp, Artificial Sequence
  source: /note="Description of Artificial Sequence: Synthetic oligonucleotide"
agatgatgccacactgcagc

SEQ ID NO: 2224 - DNA, 20 bp, Artificial Sequence
  source: /note="Description of Artificial Sequence: Synthetic oligonucleotide"
tagatgatgccacactgcag

SEQ ID NO: 2225 - DNA, 20 bp, Artificial Sequence
  source: /note="Description of Artificial Sequence: Synthetic oligonucleotide"
atagatgatgccacactgca

SEQ ID NO: 2226 - DNA, 20 bp, Artificial Sequence
  source: /note="Description of Artificial Sequence: Synthetic oligonucleotide"
catagatgatgccacactgc

SEQ ID NO: 2227 - DNA, 20 bp, Artificial Sequence
  source: /note="Description of Artificial Sequence: Synthetic oligonucleotide"
gcatagatgatgccacactg

SEQ ID NO: 2228 - DNA, 20 bp, Artificial Sequence
  source: /note="Description of Artificial Sequence: Synthetic oligonucleotide"
cgcatagatgatgccacact

SEQ ID NO: 2229 - DNA, 20 bp, Artificial Sequence
  source: /note="Description of Artificial Sequence: Synthetic oligonucleotide"
ccgcatagatgatgccacac

SEQ ID NO: 2230 - DNA, 20 bp, Artificial Sequence
  source: /note="Description of Artificial Sequence: Synthetic oligonucleotide"
tccgcatagatgatgccaca

SEQ ID NO: 2231 - DNA, 20 bp, Artificial Sequence
  source: /note="Description of Artificial Sequence: Synthetic oligonucleotide"
gtccgcatagatgatgccac

SEQ ID NO: 2232 - DNA, 20 bp, Artificial Sequence
  source: /note="Description of Artificial Sequence: Synthetic oligonucleotide"
tgtccgcatagatgatgcca

SEQ ID NO: 2233 - DNA, 20 bp, Artificial Sequence
  source: /note="Description of Artificial Sequence: Synthetic oligonucleotide"
ttgtccgcatagatgatgcc

SEQ ID NO: 2234 - DNA, 20 bp, Artificial Sequence
  source: /note="Description of Artificial Sequence: Synthetic oligonucleotide"
gttgtccgcatagatgatgc

SEQ ID NO: 2235 - DNA, 20 bp, Artificial Sequence
  source: /note="Description of Artificial Sequence: Synthetic oligonucleotide"
ggttgtccgcatagatgatg

SEQ ID NO: 2236 - DNA, 20 bp, Artificial Sequence
  source: /note="Description of Artificial Sequence: Synthetic oligonucleotide"
aggttgtccgcatagatgat

SEQ ID NO: 2237 - DNA, 20 bp, Artificial Sequence
  source: /note="Description of Artificial Sequence: Synthetic oligonucleotide"
caggttgtccgcatagatga

SEQ ID NO: 2238 - DNA, 20 bp, Artificial Sequence
  source: /note="Description of Artificial Sequence: Synthetic oligonucleotide"
ccaggttgtccgcatagatg

SEQ ID NO: 2239 - DNA, 20 bp, Artificial Sequence
  source: /note="Description of Artificial Sequence: Synthetic oligonucleotide"
accaggttgtccgcatagat

SEQ ID NO: 2240 - DNA, 20 bp, Artificial Sequence
  source: /note="Description of Artificial Sequence: Synthetic oligonucleotide"
caccaggttgtccgcataga

SEQ ID NO: 2241 - DNA, 20 bp, Artificial Sequence
  source: /note="Description of Artificial Sequence: Synthetic oligonucleotide"
ccaccaggttgtccgcatag

SEQ ID NO: 2242 - DNA, 20 bp, Artificial Sequence
  source: /note="Description of Artificial Sequence: Synthetic oligonucleotide"
accaccaggttgtccgcata

SEQ ID NO: 2243 - DNA, 20 bp, Artificial Sequence
  source: /note="Description of Artificial Sequence: Synthetic oligonucleotide"
caccaccaggttgtccgcat

SEQ ID NO: 2244 - DNA, 20 bp, Artificial Sequence
  source: /note="Description of Artificial Sequence: Synthetic oligonucleotide"
ccaccaccaggttgtccgca

SEQ ID NO: 2245 - DNA, 20 bp, Artificial Sequence
  source: /note="Description of Artificial Sequence: Synthetic oligonucleotide"
accaccaccaggttgtccgc

SEQ ID NO: 2246 - DNA, 20 bp, Artificial Sequence
  source: /note="Description of Artificial Sequence: Synthetic oligonucleotide"
caccaccaccaggttgtccg

SEQ ID NO: 2247 - DNA, 20 bp, Artificial Sequence
  source: /note="Description of Artificial Sequence: Synthetic oligonucleotide"
ccaccaccaccaggttgtcc

SEQ ID NO: 2248 - DNA, 20 bp, Artificial Sequence
  source: /note="Description of Artificial Sequence: Synthetic oligonucleotide"
tccaccaccaccaggttgtc

SEQ ID NO: 2249 - DNA, 20 bp, Artificial Sequence
  source: /note="Description of Artificial Sequence: Synthetic oligonucleotide"
gtccaccaccaccaggttgt

SEQ ID NO: 2250 - DNA, 20 bp, Artificial Sequence
  source: /note="Description of Artificial Sequence: Synthetic oligonucleotide"
tgtccaccaccaccaggttg

SEQ ID NO: 2251 - DNA, 20 bp, Artificial Sequence
  source: /note="Description of Artificial Sequence: Synthetic oligonucleotide"
ttgtccaccaccaccaggtt

SEQ ID NO: 2252 - DNA, 20 bp, Artificial Sequence
  source: /note="Description of Artificial Sequence: Synthetic oligonucleotide"
cttgtccaccaccaccaggt

SEQ ID NO: 2253 - DNA, 20 bp, Artificial Sequence
  source: /note="Description of Artificial Sequence: Synthetic oligonucleotide"
ccttgtccaccaccaccagg

SEQ ID NO: 2254 - DNA, 20 bp, Artificial Sequence
  source: /note="Description of Artificial Sequence: Synthetic oligonucleotide"
tccttgtccaccaccaccag

SEQ ID NO: 2255 - DNA, 20 bp, Artificial Sequence
  source: /note="Description of Artificial Sequence: Synthetic oligonucleotide"
ctccttgtccaccaccacca

SEQ ID NO: 2256 - DNA, 20 bp, Artificial Sequence
  source: /note="Description of Artificial Sequence: Synthetic oligonucleotide"
tctccttgtccaccaccacc

SEQ ID NO: 2257 - DNA, 20 bp, Artificial Sequence
  source: /note="Description of Artificial Sequence: Synthetic oligonucleotide"
ctctccttgtccaccaccac

SEQ ID NO: 2258 - DNA, 20 bp, Artificial Sequence
  source: /note="Description of Artificial Sequence: Synthetic oligonucleotide"
gctctccttgtccaccacca

SEQ ID NO: 2259 - DNA, 20 bp, Artificial Sequence
  source: /note="Description of Artificial Sequence: Synthetic oligonucleotide"
tgctctccttgtccaccacc

SEQ ID NO: 2260 - DNA, 20 bp, Artificial Sequence
  source: /note="Description of Artificial Sequence: Synthetic oligonucleotide"
gtgctctccttgtccaccac

SEQ ID NO: 2261 - DNA, 20 bp, Artificial Sequence
  source: /note="Description of Artificial Sequence: Synthetic oligonucleotide"
ggtgctctccttgtccacca

SEQ ID NO: 2262 - DNA, 20 bp, Artificial Sequence
  source: /note="Description of Artificial Sequence: Synthetic oligonucleotide"
tggtgctctccttgtccacc

SEQ ID NO: 2263 - DNA, 20 bp, Artificial Sequence
  source: /note="Description of Artificial Sequence: Synthetic oligonucleotide"
atggtgctctccttgtccac

SEQ ID NO: 2264 - DNA, 20 bp, Artificial Sequence
  source: /note="Description of Artificial Sequence: Synthetic oligonucleotide"
catggtgctctccttgtcca

SEQ ID NO: 2265 - DNA, 20 bp, Artificial Sequence
  source: /note="Description of Artificial Sequence: Synthetic oligonucleotide"
tcatggtgctctccttgtcc

SEQ ID NO: 2266 - DNA, 20 bp, Artificial Sequence
  source: /note="Description of Artificial Sequence: Synthetic oligonucleotide"
ctcatggtgctctccttgtc

SEQ ID NO: 2267 - DNA, 20 bp, Artificial Sequence
  source: /note="Description of Artificial Sequence: Synthetic oligonucleotide"
gctcatggtgctctccttgt

SEQ ID NO: 2268 - DNA, 20 bp, Artificial Sequence
  source: /note="Description of Artificial Sequence: Synthetic oligonucleotide"
cgctcatggtgctctccttg

SEQ ID NO: 2269 - DNA, 20 bp, Artificial Sequence
  source: /note="Description of Artificial Sequence: Synthetic oligonucleotide"
gcgctcatggtgctctcctt

SEQ ID NO: 2270 - DNA, 20 bp, Artificial Sequence
  source: /note="Description of Artificial Sequence: Synthetic oligonucleotide"
ggcgctcatggtgctctcct

SEQ ID NO: 2271 - DNA, 20 bp, Artificial Sequence
  source: /note="Description of Artificial Sequence: Synthetic oligonucleotide"
cggcgctcatggtgctctcc

SEQ ID NO: 2272 - DNA, 20 bp, Artificial Sequence
  source: /note="Description of Artificial Sequence: Synthetic oligonucleotide"
tcggcgctcatggtgctctc

SEQ ID NO: 2273 - DNA, 20 bp, Artificial Sequence
  source: /note="Description of Artificial Sequence: Synthetic oligonucleotide"
ctcggcgctcatggtgctct

SEQ ID NO: 2274 - DNA, 20 bp, Artificial Sequence
  source: /note="Description of Artificial Sequence: Synthetic oligonucleotide"
cctcggcgctcatggtgctc

SEQ ID NO: 2275 - DNA, 20 bp, Artificial Sequence
  source: /note="Description of Artificial Sequence: Synthetic oligonucleotide"
tcctcggcgctcatggtgct

SEQ ID NO: 2276 - DNA, 20 bp, Artificial Sequence
  source: /note="Description of Artificial Sequence: Synthetic oligonucleotide"
ctcctcggcgctcatggtgc

SEQ ID NO: 2277 - DNA, 20 bp, Artificial Sequence
  source: /note="Description of Artificial Sequence: Synthetic oligonucleotide"
cctcctcggcgctcatggtg

SEQ ID NO: 2278 - DNA, 20 bp, Artificial Sequence
  source: /note="Description of Artificial Sequence: Synthetic oligonucleotide"
tcctcctcggcgctcatggt

SEQ ID NO: 2279 - DNA, 20 bp, Artificial Sequence
  source: /note="Description of Artificial Sequence: Synthetic oligonucleotide"
gtcctcctcggcgctcatgg

SEQ ID NO: 2280 - DNA, 20 bp, Artificial Sequence
  source: /note="Description of Artificial Sequence: Synthetic oligonucleotide"
agtcctcctcggcgctcatg

SEQ ID NO: 2281 - DNA, 20 bp, Artificial Sequence
  source: /note="Description of Artificial Sequence: Synthetic oligonucleotide"
tagtcctcctcggcgctcat

SEQ ID NO: 2282 - DNA, 20 bp, Artificial Sequence
  source: /note="Description of Artificial Sequence: Synthetic oligonucleotide"
gtagtcctcctcggcgctca

SEQ ID NO: 2283 - DNA, 20 bp, Artificial Sequence
  source: /note="Description of Artificial Sequence: Synthetic oligonucleotide"
tgtagtcctcctcggcgctc

SEQ ID NO: 2284 - DNA, 20 bp, Artificial Sequence
  source: /note="Description of Artificial Sequence: Synthetic oligonucleotide"
atgtagtcctcctcggcgct

SEQ ID NO: 2285 - DNA, 20 bp, Artificial Sequence
  source: /note="Description of Artificial Sequence: Synthetic oligonucleotide"
catgtagtcctcctcggcgc

SEQ ID NO: 2286 - DNA, 20 bp, Artificial Sequence
  source: /note="Description of Artificial Sequence: Synthetic oligonucleotide"
ccatgtagtcctcctcggcg

SEQ ID NO: 2287 - DNA, 20 bp, Artificial Sequence
  source: /note="Description of Artificial Sequence: Synthetic oligonucleotide"
gccatgtagtcctcctcggc

SEQ ID NO: 2288 - DNA, 20 bp, Artificial Sequence
  source: /note="Description of Artificial Sequence: Synthetic oligonucleotide"
cgccatgtagtcctcctcgg

SEQ ID NO: 2289 - DNA, 20 bp, Artificial Sequence
  source: /note="Description of Artificial Sequence: Synthetic oligonucleotide"
ccgccatgtagtcctcctcg

SEQ ID NO: 2290 - DNA, 20 bp, Artificial Sequence
  source: /note="Description of Artificial Sequence: Synthetic oligonucleotide"
tccgccatgtagtcctcctc

SEQ ID NO: 2291 - DNA, 20 bp, Artificial Sequence
  source: /note="Description of Artificial Sequence: Synthetic oligonucleotide"
gtccgccatgtagtcctcct

SEQ ID NO: 2292 - DNA, 20 bp, Artificial Sequence
  source: /note="Description of Artificial Sequence: Synthetic oligonucleotide"
cgtccgccatgtagtcctcc

SEQ ID NO: 2293 - DNA, 20 bp, Artificial Sequence
  source: /note="Description of Artificial Sequence: Synthetic oligonucleotide"
gcgtccgccatgtagtcctc

SEQ ID NO: 2294 - DNA, 20 bp, Artificial Sequence
  source: /note="Description of Artificial Sequence: Synthetic oligonucleotide"
ggcgtccgccatgtagtcct

SEQ ID NO: 2295 - DNA, 20 bp, Artificial Sequence
  source: /note="Description of Artificial Sequence: Synthetic oligonucleotide"
tggcgtccgccatgtagtcc

SEQ ID NO: 2296 - DNA, 20 bp, Artificial Sequence
  source: /note="Description of Artificial Sequence: Synthetic oligonucleotide"
ttggcgtccgccatgtagtc

SEQ ID NO: 2297 - DNA, 20 bp, Artificial Sequence
  source: /note="Description of Artificial Sequence: Synthetic oligonucleotide"
cttggcgtccgccatgtagt

SEQ ID NO: 2298 - DNA, 20 bp, Artificial Sequence
  source: /note="Description of Artificial Sequence: Synthetic oligonucleotide"
tcttggcgtccgccatgtag

SEQ ID NO: 2299 - DNA, 20 bp, Artificial Sequence
  source: /note="Description of Artificial Sequence: Synthetic oligonucleotide"
gtcttggcgtccgccatgta

SEQ ID NO: 2300 - DNA, 20 bp, Artificial Sequence
  source: /note="Description of Artificial Sequence: Synthetic oligonucleotide"
tggtcttggcgtccgccatg

SEQ ID NO: 2301 - DNA, 20 bp, Artificial Sequence
  source: /note="Description of Artificial Sequence: Synthetic oligonucleotide"
atggtcttggcgtccgccat

SEQ ID NO: 2302 - DNA, 20 bp, Artificial Sequence
  source: /note="Description of Artificial Sequence: Synthetic oligonucleotide"
gatggtcttggcgtccgcca

SEQ ID NO: 2303 - DNA, 20 bp, Artificial Sequence
  source: /note="Description of Artificial Sequence: Synthetic oligonucleotide"
cgatggtcttggcgtccgcc

SEQ ID NO: 2304 - DNA, 20 bp, Artificial Sequence
  source: /note="Description of Artificial Sequence: Synthetic oligonucleotide"
acgatggtcttggcgtccgc

SEQ ID NO: 2305 - DNA, 20 bp, Artificial Sequence
  source: /note="Description of Artificial Sequence: Synthetic oligonucleotide"
gacgatggtcttggcgtccg

SEQ ID NO: 2306 - DNA, 20 bp, Artificial Sequence
  source: /note="Description of Artificial Sequence: Synthetic oligonucleotide"
tgacgatggtcttggcgtcc

SEQ ID NO: 2307 - DNA, 20 bp, Artificial Sequence
  source: /note="Description of Artificial Sequence: Synthetic oligonucleotide"
ttgacgatggtcttggcgtc

SEQ ID NO: 2308 - DNA, 20 bp, Artificial Sequence
  source: /note="Description of Artificial Sequence: Synthetic oligonucleotide"
gttgacgatggtcttggcgt

SEQ ID NO: 2309 - DNA, 20 bp, Artificial Sequence
  source: /note="Description of Artificial Sequence: Synthetic oligonucleotide"
cgttgacgatggtcttggcg

SEQ ID NO: 2310 - DNA, 20 bp, Artificial Sequence
  source: /note="Description of Artificial Sequence: Synthetic oligonucleotide"
acgttgacgatggtcttggc

SEQ ID NO: 2311 - DNA, 20 bp, Artificial Sequence
  source: /note="Description of Artificial Sequence: Synthetic oligonucleotide"
cacgttgacgatggtcttgg

SEQ ID NO: 2312 - DNA, 20 bp, Artificial Sequence
  source: /note="Description of Artificial Sequence: Synthetic oligonucleotide"
gcacgttgacgatggtcttg

SEQ ID NO: 2313 - DNA, 20 bp, Artificial Sequence
  source: /note="Description of Artificial Sequence: Synthetic oligonucleotide"
tgcacgttgacgatggtctt

SEQ ID NO: 2314 - DNA, 20 bp, Artificial Sequence
  source: /note="Description of Artificial Sequence: Synthetic oligonucleotide"
ctgcacgttgacgatggtct

SEQ ID NO: 2315 - DNA, 20 bp, Artificial Sequence
  source: /note="Description of Artificial Sequence: Synthetic oligonucleotide"
tctgcacgttgacgatggtc

SEQ ID NO: 2316 - DNA, 20 bp, Artificial Sequence
  source: /note="Description of Artificial Sequence: Synthetic oligonucleotide"
gtctgcacgttgacgatggt

SEQ ID NO: 2317 - DNA, 20 bp, Artificial Sequence
  source: /note="Description of Artificial Sequence: Synthetic oligonucleotide"
ggtctgcacgttgacgatgg

SEQ ID NO: 2318 - DNA, 20 bp, Artificial Sequence
  source: /note="Description of Artificial Sequence: Synthetic oligonucleotide"
atggtctgcacgttgacgat

SEQ ID NO: 2319 - DNA, 20 bp, Artificial Sequence
  source: /note="Description of Artificial Sequence: Synthetic oligonucleotide"
catggtctgcacgttgacga

SEQ ID NO: 2320 - DNA, 20 bp, Artificial Sequence
  source: /note="Description of Artificial Sequence: Synthetic oligonucleotide"
acatggtctgcacgttgacg

SEQ ID NO: 2321 - DNA, 20 bp, Artificial Sequence
  source: /note="Description of Artificial Sequence: Synthetic oligonucleotide"
aacatggtctgcacgttgac

SEQ ID NO: 2322 - DNA, 20 bp, Artificial Sequence
  source: /note="Description of Artificial Sequence: Synthetic oligonucleotide"
gaacatggtctgcacgttga

SEQ ID NO: 2323 - DNA, 20 bp, Artificial Sequence
  source: /note="Description of Artificial Sequence: Synthetic oligonucleotide"
ggaacatggtctgcacgttg

SEQ ID NO: 2324 - DNA, 20 bp, Artificial Sequence
  source: /note="Description of Artificial Sequence: Synthetic oligonucleotide"
cggaacatggtctgcacgtt

SEQ ID NO: 2325 - DNA, 20 bp, Artificial Sequence
  source: /note="Description of Artificial Sequence: Synthetic oligonucleotide"
ccggaacatggtctgcacgt

SEQ ID NO: 2326 - DNA, 20 bp, Artificial Sequence
  source: /note="Description of Artificial Sequence: Synthetic oligonucleotide"
gccggaacatggtctgcacg

SEQ ID NO: 2327 - DNA, 20 bp, Artificial Sequence
  source: /note="Description of Artificial Sequence: Synthetic oligonucleotide"
agccggaacatggtctgcac

SEQ ID NO: 2328 - DNA, 20 bp, Artificial Sequence
  source: /note="Description of Artificial Sequence: Synthetic oligonucleotide"
gagccggaacatggtctgca

SEQ ID NO: 2329 - DNA, 20 bp, Artificial Sequence
  source: /note="Description of Artificial Sequence: Synthetic oligonucleotide"
agagccggaacatggtctgc

SEQ ID NO: 2330 - DNA, 20 bp, Artificial Sequence
  source: /note="Description of Artificial Sequence: Synthetic oligonucleotide"
aagagccggaacatggtctg

SEQ ID NO: 2331 - DNA, 20 bp, Artificial Sequence
  source: /note="Description of Artificial Sequence: Synthetic oligonucleotide"
gaagagccggaacatggtct

SEQ ID NO: 2332 - DNA, 20 bp, Artificial Sequence
  source: /note="Description of Artificial Sequence: Synthetic oligonucleotide"
ggaagagccggaacatggtc

SEQ ID NO: 2333 - DNA, 20 bp, Artificial Sequence
  source: /note="Description of Artificial Sequence: Synthetic oligonucleotide"
gggaagagccggaacatggt

SEQ ID NO: 2334 - DNA, 20 bp, Artificial Sequence
  source: /note="Description of Artificial Sequence: Synthetic oligonucleotide"
gtggtgatgctgaggctggg

SEQ ID NO: 2335 - DNA, 20 bp, Artificial Sequence
  source: /note="Description of Artificial Sequence: Synthetic oligonucleotide"
cgtggtgatgctgaggctgg

SEQ ID NO: 2336 - DNA, 20 bp, Artificial Sequence
  source: /note="Description of Artificial Sequence: Synthetic oligonucleotide"
ccgtggtgatgctgaggctg

SEQ ID NO: 2337 - DNA, 20 bp, Artificial Sequence
  source: /note="Description of Artificial Sequence: Synthetic oligonucleotide"
tccgtggtgatgctgaggct

SEQ ID NO: 2338 - DNA, 20 bp, Artificial Sequence
  source: /note="Description of Artificial Sequence: Synthetic oligonucleotide"
ctccgtggtgatgctgaggc

SEQ ID NO: 2339 - DNA, 20 bp, Artificial Sequence
  source: /note="Description of Artificial Sequence: Synthetic oligonucleotide"
gctccgtggtgatgctgagg

SEQ ID NO: 2340 - DNA, 20 bp, Artificial Sequence
  source: /note="Description of Artificial Sequence: Synthetic oligonucleotide"
agctccgtggtgatgctgag

SEQ ID NO: 2341 - DNA, 20 bp, Artificial Sequence
  source: /note="Description of Artificial Sequence: Synthetic oligonucleotide"
gagctccgtggtgatgctga

SEQ ID NO: 2342 - DNA, 20 bp, Artificial Sequence
  source: /note="Description of Artificial Sequence: Synthetic oligonucleotide"
tgagctccgtggtgatgctg

SEQ ID NO: 2343 - DNA, 20 bp, Artificial Sequence
  source: /note="Description of Artificial Sequence: Synthetic oligonucleotide"
gtgagctccgtggtgatgct

SEQ ID NO: 2344 - DNA, 20 bp, Artificial Sequence
  source: /note="Description of Artificial Sequence: Synthetic oligonucleotide"
ggtgagctccgtggtgatgc

SEQ ID NO: 2345 - DNA, 20 bp, Artificial Sequence
  source: /note="Description of Artificial Sequence: Synthetic oligonucleotide"
gggtgagctccgtggtgatg

SEQ ID NO: 2346 - DNA, 20 bp, Artificial Sequence
  source: /note="Description of Artificial Sequence: Synthetic oligonucleotide"
tgggtgagctccgtggtgat

SEQ ID NO: 2347 - DNA, 20 bp, Artificial Sequence
  source: /note="Description of Artificial Sequence: Synthetic oligonucleotide"
gtgggtgagctccgtggtga

SEQ ID NO: 2348 - DNA, 20 bp, Artificial Sequence
  source: /note="Description of Artificial Sequence: Synthetic oligonucleotide"
ggtgggtgagctccgtggtg

SEQ ID NO: 2349 - DNA, 20 bp, Artificial Sequence
  source: /note="Description of Artificial Sequence: Synthetic oligonucleotide"
gggtgggtgagctccgtggt

SEQ ID NO: 2350 - DNA, 20 bp, Artificial Sequence
  source: /note="Description of Artificial Sequence: Synthetic oligonucleotide"
agggtgggtgagctccgtgg

SEQ ID NO: 2351 - DNA, 20 bp, Artificial Sequence
  source: /note="Description of Artificial Sequence: Synthetic oligonucleotide"
aagggtgggtgagctccgtg

SEQ ID NO: 2352 - DNA, 20 bp, Artificial Sequence
  source: /note="Description of Artificial Sequence: Synthetic oligonucleotide"
gaagggtgggtgagctccgt

SEQ ID NO: 2353 - DNA, 20 bp, Artificial Sequence
  source: /note="Description of Artificial Sequence: Synthetic oligonucleotide"
ggaagggtgggtgagctccg

SEQ ID NO: 2354 - DNA, 20 bp, Artificial Sequence
  source: /note="Description of Artificial Sequence: Synthetic oligonucleotide"
tggaagggtgggtgagctcc

SEQ ID NO: 2355 - DNA, 20 bp, Artificial Sequence
  source: /note="Description of Artificial Sequence: Synthetic oligonucleotide"
ttggaagggtgggtgagctc

SEQ ID NO: 2356 - DNA, 20 bp, Artificial Sequence
  source: /note="Description of Artificial Sequence: Synthetic oligonucleotide"
gttggaagggtgggtgagct

SEQ ID NO: 2357 - DNA, 20 bp, Artificial Sequence
  source: /note="Description of Artificial Sequence: Synthetic oligonucleotide"
tgttggaagggtgggtgagc

SEQ ID NO: 2358 - DNA, 20 bp, Artificial Sequence
  source: /note="Description of Artificial Sequence: Synthetic oligonucleotide"
catgttggaagggtgggtga

SEQ ID NO: 2359 - DNA, 20 bp, Artificial Sequence
  source: /note="Description of Artificial Sequence: Synthetic oligonucleotide"
gcatgttggaagggtgggtg

SEQ ID NO: 2360 - DNA, 20 bp, Artificial Sequence
  source: /note="Description of Artificial Sequence: Synthetic oligonucleotide"
cgcatgttggaagggtgggt

SEQ ID NO: 2361 - DNA, 20 bp, Artificial Sequence
  source: /note="Description of Artificial Sequence: Synthetic oligonucleotide"
gcgcatgttggaagggtggg

SEQ ID NO: 2362 - DNA, 20 bp, Artificial Sequence
  source: /note="Description of Artificial Sequence: Synthetic oligonucleotide"
agcgcatgttggaagggtgg

SEQ ID NO: 2363 - DNA, 20 bp, Artificial Sequence
  source: /note="Description of Artificial Sequence: Synthetic oligonucleotide"
aagcgcatgttggaagggtg

SEQ ID NO: 2364 - DNA, 20 bp, Artificial Sequence
  source: /note="Description of Artificial Sequence: Synthetic oligonucleotide"
gaagcgcatgttggaagggt

SEQ ID NO: 2365 - DNA, 20 bp, Artificial Sequence
  source: /note="Description of Artificial Sequence: Synthetic oligonucleotide"
tgaagcgcatgttggaaggg

SEQ ID NO: 2366 - DNA, 20 bp, Artificial Sequence
  source: /note="Description of Artificial Sequence: Synthetic oligonucleotide"
atgaagcgcatgttggaagg

SEQ ID NO: 2367 - DNA, 20 bp, Artificial Sequence
  source: /note="Description of Artificial Sequence: Synthetic oligonucleotide"
catgaagcgcatgttggaag

SEQ ID NO: 2368 - DNA, 20 bp, Artificial Sequence
  source: /note="Description of Artificial Sequence: Synthetic oligonucleotide"
gcatgaagcgcatgttggaa

SEQ ID NO: 2369 - DNA, 20 bp, Artificial Sequence
  source: /note="Description of Artificial Sequence: Synthetic oligonucleotide"
tgcatgaagcgcatgttgga

SEQ ID NO: 2370 - DNA, 20 bp, Artificial Sequence
  source: /note="Description of Artificial Sequence: Synthetic oligonucleotide"
ctgcatgaagcgcatgttgg

SEQ ID NO: 2371 - DNA, 20 bp, Artificial Sequence
  source: /note="Description of Artificial Sequence: Synthetic oligonucleotide"
actgcatgaagcgcatgttg

SEQ ID NO: 2372 - DNA, 20 bp, Artificial Sequence
  source: /note="Description of Artificial Sequence: Synthetic oligonucleotide"
aactgcatgaagcgcatgtt

SEQ ID NO: 2373 - DNA, 20 bp, Artificial Sequence
  source: /note="Description of Artificial Sequence: Synthetic oligonucleotide"
gaactgcatgaagcgcatgt

SEQ ID NO: 2374 - DNA, 20 bp, Artificial Sequence
  source: /note="Description of Artificial Sequence: Synthetic oligonucleotide"
ggaactgcatgaagcgcatg

SEQ ID NO: 2375 - DNA, 20 bp, Artificial Sequence
  source: /note="Description of Artificial Sequence: Synthetic oligonucleotide"
cggaactgcatgaagcgcat

SEQ ID NO: 2376 - DNA, 20 bp, Artificial Sequence
  source: /note="Description of Artificial Sequence: Synthetic oligonucleotide"
gcggaactgcatgaagcgca

SEQ ID NO: 2377 - DNA, 20 bp, Artificial Sequence
  source: /note="Description of Artificial Sequence: Synthetic oligonucleotide"
cgcggaactgcatgaagcgc

SEQ ID NO: 2378 - DNA, 20 bp, Artificial Sequence
  source: /note="Description of Artificial Sequence: Synthetic oligonucleotide"
gcgcggaactgcatgaagcg

SEQ ID NO: 2379 - DNA, 20 bp, Artificial Sequence
  source: /note="Description of Artificial Sequence: Synthetic oligonucleotide"
ggcgcggaactgcatgaagc

SEQ ID NO: 2380 - DNA, 20 bp, Artificial Sequence
  source: /note="Description of Artificial Sequence: Synthetic oligonucleotide"
tggcgcggaactgcatgaag

SEQ ID NO: 2381 - DNA, 20 bp, Artificial Sequence
  source: /note="Description of Artificial Sequence: Synthetic oligonucleotide"
cttggcgcggaactgcatga

SEQ ID NO: 2382 - DNA, 20 bp, Artificial Sequence
  source: /note="Description of Artificial Sequence: Synthetic oligonucleotide"
ccttggcgcggaactgcatg

SEQ ID NO: 2383 - DNA, 20 bp, Artificial Sequence
  source: /note="Description of Artificial Sequence: Synthetic oligonucleotide"
tccttggcgcggaactgcat

SEQ ID NO: 2384 - DNA, 20 bp, Artificial Sequence
  source: /note="Description of Artificial Sequence: Synthetic oligonucleotide"
gtccttggcgcggaactgca

SEQ ID NO: 2385 - DNA, 20 bp, Artificial Sequence
  source: /note="Description of Artificial Sequence: Synthetic oligonucleotide"
tgtccttggcgcggaactgc

SEQ ID NO: 2386 - DNA, 20 bp, Artificial Sequence
  source: /note="Description of Artificial Sequence: Synthetic oligonucleotide"
ctgtccttggcgcggaactg

SEQ ID NO: 2387 - DNA, 20 bp, Artificial Sequence
  source: /note="Description of Artificial Sequence: Synthetic oligonucleotide"
gctgtccttggcgcggaact

SEQ ID NO: 2388 - DNA, 20 bp, Artificial Sequence
  source: /note="Description of Artificial Sequence: Synthetic oligonucleotide"
agctgtccttggcgcggaac

SEQ ID NO: 2389 - DNA, 20 bp, Artificial Sequence
  source: /note="Description of Artificial Sequence: Synthetic oligonucleotide"
tagctgtccttggcgcggaa

SEQ ID NO: 2390 - DNA, 20 bp, Artificial Sequence
  source: /note="Description of Artificial Sequence: Synthetic oligonucleotide"
gtagctgtccttggcgcgga

SEQ ID NO: 2391 - DNA, 20 bp, Artificial Sequence
  source: /note="Description of Artificial Sequence: Synthetic oligonucleotide"
agtagctgtccttggcgcgg

SEQ ID NO: 2392 - DNA, 20 bp, Artificial Sequence
  source: /note="Description of Artificial Sequence: Synthetic oligonucleotide"
gagtagctgtccttggcgcg

SEQ ID NO: 2393 - DNA, 20 bp, Artificial Sequence
  source: /note="Description of Artificial Sequence: Synthetic oligonucleotide"
agagtagctgtccttggcgc

SEQ ID NO: 2394 - DNA, 20 bp, Artificial Sequence
  source: /note="Description of Artificial Sequence: Synthetic oligonucleotide"
gagagtagctgtccttggcg

SEQ ID NO: 2395 - DNA, 20 bp, Artificial Sequence
  source: /note="Description of Artificial Sequence: Synthetic oligonucleotide"
agagagtagctgtccttggc

SEQ ID NO: 2396 - DNA, 20 bp, Artificial Sequence
  source: /note="Description of Artificial Sequence: Synthetic oligonucleotide"
cagagagtagctgtccttgg

SEQ ID NO: 2397 - DNA, 20 bp, Artificial Sequence
  source: /note="Description of Artificial Sequence: Synthetic oligonucleotide"
ccagagagtagctgtccttg

SEQ ID NO: 2398 - DNA, 20 bp, Artificial Sequence
  source: /note="Description of Artificial Sequence: Synthetic oligonucleotide"
gccagagagtagctgtcctt

SEQ ID NO: 2399 - DNA, 20 bp, Artificial Sequence
  source: /note="Description of Artificial Sequence: Synthetic oligonucleotide"
agccagagagtagctgtcct

SEQ ID NO: 2400 - DNA, 20 bp, Artificial Sequence
  source: /note="Description of Artificial Sequence: Synthetic oligonucleotide"
agagccagagagtagctgtc

SEQ ID NO: 2401 - DNA, 20 bp, Artificial Sequence
  source: /note="Description of Artificial Sequence: Synthetic oligonucleotide"
aagagccagagagtagctgt

SEQ ID NO: 2402 - DNA, 20 bp, Artificial Sequence
  source: /note="Description of Artificial Sequence: Synthetic oligonucleotide"
aaagagccagagagtagctg

SEQ ID NO: 2403 - DNA, 20 bp, Artificial Sequence
  source: /note="Description of Artificial Sequence: Synthetic oligonucleotide"
gaaagagccagagagtagct

SEQ ID NO: 2404 - DNA, 20 bp, Artificial Sequence
  source: /note="Description of Artificial Sequence: Synthetic oligonucleotide"
ggaaagagccagagagtagc

SEQ ID NO: 2405 - DNA, 20 bp, Artificial Sequence
  source: /note="Description of Artificial Sequence: Synthetic oligonucleotide"
tggaaagagccagagagtag

SEQ ID NO: 2406 - DNA, 20 bp, Artificial Sequence
  source: /note="Description of Artificial Sequence: Synthetic oligonucleotide"
ttggaaagagccagagagta

SEQ ID NO: 2407 - DNA, 20 bp, Artificial Sequence
  source: /note="Description of Artificial Sequence: Synthetic oligonucleotide"
tttggaaagagccagagagt

SEQ ID NO: 2408 - DNA, 20 bp, Artificial Sequence
  source: /note="Description of Artificial Sequence: Synthetic oligonucleotide"
gtttggaaagagccagagag

SEQ ID NO: 2409 - DNA, 20 bp, Artificial Sequence
  source: /note="Description of Artificial Sequence: Synthetic oligonucleotide"
agtttggaaagagccagaga

SEQ ID NO: 2410 - DNA, 20 bp, Artificial Sequence
  source: /note="Description of Artificial Sequence: Synthetic oligonucleotide"
tagtttggaaagagccagag

SEQ ID NO: 2411 - DNA, 20 bp, Artificial Sequence
  source: /note="Description of Artificial Sequence: Synthetic oligonucleotide"
ctagtttggaaagagccaga

SEQ ID NO: 2412 - DNA, 20 bp, Artificial Sequence
  source: /note="Description of Artificial Sequence: Synthetic oligonucleotide"
tctagtttggaaagagccag

SEQ ID NO: 2413 - DNA, 20 bp, Artificial Sequence
  source: /note="Description of Artificial Sequence: Synthetic oligonucleotide"
ttctagtttggaaagagcca

SEQ ID NO: 2414 - DNA, 20 bp, Artificial Sequence
  source: /note="Description of Artificial Sequence: Synthetic oligonucleotide"
tttctagtttggaaagagcc

SEQ ID NO: 2415 - DNA, 20 bp, Artificial Sequence
  source: /note="Description of Artificial Sequence: Synthetic oligonucleotide"
ttttctagtttggaaagagc

SEQ ID NO: 2416 - DNA, 20 bp, Artificial Sequence
  source: /note="Description of Artificial Sequence: Synthetic oligonucleotide"
cttttctagtttggaaagag

SEQ ID NO: 2417 - DNA, 20 bp, Artificial Sequence
  source: /note="Description of Artificial Sequence: Synthetic oligonucleotide"
ctcttttctagtttggaaag

SEQ ID NO: 2418 - DNA, 20 bp, Artificial Sequence
  source: /note="Description of Artificial Sequence: Synthetic oligonucleotide"
cctcttttctagtttggaaa

SEQ ID NO: 2419 - DNA, 20 bp, Artificial Sequence
  source: /note="Description of Artificial Sequence: Synthetic oligonucleotide"
ccctcttttctagtttggaa

SEQ ID NO: 2420 - DNA, 20 bp, Artificial Sequence
  source: /note="Description of Artificial Sequence: Synthetic oligonucleotide"
tccctcttttctagtttgga

SEQ ID NO: 2421 - DNA, 20 bp, Artificial Sequence
  source: /note="Description of Artificial Sequence: Synthetic oligonucleotide"
ctccctcttttctagtttgg

SEQ ID NO: 2422 - DNA, 20 bp, Artificial Sequence
  source: /note="Description of Artificial Sequence: Synthetic oligonucleotide"
gctccctcttttctagtttg

SEQ ID NO: 2423 - DNA, 20 bp, Artificial Sequence
  source: /note="Description of Artificial Sequence: Synthetic oligonucleotide"
tcgctccctcttttctagtt

SEQ ID NO: 2424 - DNA, 20 bp, Artificial Sequence
  source: /note="Description of Artificial Sequence: Synthetic oligonucleotide"
ctcgctccctcttttctagt

SEQ ID NO: 2425 - DNA, 20 bp, Artificial Sequence
  source: /note="Description of Artificial Sequence: Synthetic oligonucleotide"
tctcgctccctcttttctag

SEQ ID NO: 2426 - DNA, 20 bp, Artificial Sequence
  source: /note="Description of Artificial Sequence: Synthetic oligonucleotide"
ctctcgctccctcttttcta

SEQ ID NO: 2427 - DNA, 20 bp, Artificial Sequence
  source: /note="Description of Artificial Sequence: Synthetic oligonucleotide"
tctctcgctccctcttttct

SEQ ID NO: 2428 - DNA, 20 bp, Artificial Sequence
  source: /note="Description of Artificial Sequence: Synthetic oligonucleotide"
ttctctcgctccctcttttc

SEQ ID NO: 2429 - DNA, 20 bp, Artificial Sequence
  source: /note="Description of Artificial Sequence: Synthetic oligonucleotide"
attctctcgctccctctttt

SEQ ID NO: 2430 - DNA, 20 bp, Artificial Sequence
  source: /note="Description of Artificial Sequence: Synthetic oligonucleotide"
cattctctcgctccctcttt

SEQ ID NO: 2431 - DNA, 20 bp, Artificial Sequence
  source: /note="Description of Artificial Sequence: Synthetic oligonucleotide"
ccattctctcgctccctctt

SEQ ID NO: 2432 - DNA, 20 bp, Artificial Sequence
  source: /note="Description of Artificial Sequence: Synthetic oligonucleotide"
gccattctctcgctccctct

SEQ ID NO: 2433 - DNA, 20 bp, Artificial Sequence
  source: /note="Description of Artificial Sequence: Synthetic oligonucleotide"
agccattctctcgctccctc

SEQ ID NO: 2434 - DNA, 20 bp, Artificial Sequence
  source: /note="Description of Artificial Sequence: Synthetic oligonucleotide"
gagccattctctcgctccct

SEQ ID NO: 2435 - DNA, 20 bp, Artificial Sequence
  source: /note="Description of Artificial Sequence: Synthetic oligonucleotide"
ggagccattctctcgctccc

SEQ ID NO: 2436 - DNA, 20 bp, Artificial Sequence
  source: /note="Description of Artificial Sequence: Synthetic oligonucleotide"
tggagccattctctcgctcc

SEQ ID NO: 2437 - DNA, 20 bp, Artificial Sequence
  source: /note="Description of Artificial Sequence: Synthetic oligonucleotide"
ttggagccattctctcgctc

SEQ ID NO: 2438 - DNA, 20 bp, Artificial Sequence
  source: /note="Description of Artificial Sequence: Synthetic oligonucleotide"
gttggagccattctctcgct

SEQ ID NO: 2439 - DNA, 20 bp, Artificial Sequence
  source: /note="Description of Artificial Sequence: Synthetic oligonucleotide"
ggttggagccattctctcgc

SEQ ID NO: 2440 - DNA, 20 bp, Artificial Sequence
  source: /note="Description of Artificial Sequence: Synthetic oligonucleotide"
aggttggagccattctctcg

SEQ ID NO: 2441 - DNA, 20 bp, Artificial Sequence
  source: /note="Description of Artificial Sequence: Synthetic oligonucleotide"
caggttggagccattctctc

SEQ ID NO: 2442 - DNA, 20 bp, Artificial Sequence
  source: /note="Description of Artificial Sequence: Synthetic oligonucleotide"
ccaggttggagccattctct

SEQ ID NO: 2443 - DNA, 20 bp, Artificial Sequence
  source: /note="Description of Artificial Sequence: Synthetic oligonucleotide"
gccaggttggagccattctc

SEQ ID NO: 2444 - DNA, 20 bp, Artificial Sequence
  source: /note="Description of Artificial Sequence: Synthetic oligonucleotide"
ggccaggttggagccattct

SEQ ID NO: 2445 - DNA, 20 bp, Artificial Sequence
  source: /note="Description of Artificial Sequence: Synthetic oligonucleotide"
aggccaggttggagccattc

SEQ ID NO: 2446 - DNA, 20 bp, Artificial Sequence
  source: /note="Description of Artificial Sequence: Synthetic oligonucleotide"
aaggccaggttggagccatt

SEQ ID NO: 2447 - DNA, 20 bp, Artificial Sequence
  source: /note="Description of Artificial Sequence: Synthetic oligonucleotide"
gaaggccaggttggagccat

SEQ ID NO: 2448 - DNA, 20 bp, Artificial Sequence
  source: /note="Description of Artificial Sequence: Synthetic oligonucleotide"
tgaaggccaggttggagcca

SEQ ID NO: 2449 - DNA, 20 bp, Artificial Sequence
  source: /note="Description of Artificial Sequence: Synthetic oligonucleotide"
atgaaggccaggttggagcc

SEQ ID NO: 2450 - DNA, 20 bp, Artificial Sequence
  source: /note="Description of Artificial Sequence: Synthetic oligonucleotide"
catgaaggccaggttggagc

SEQ ID NO: 2451 - DNA, 20 bp, Artificial Sequence
  source: /note="Description of Artificial Sequence: Synthetic oligonucleotide"
acatgaaggccaggttggag

SEQ ID NO: 2452 - DNA, 20 bp, Artificial Sequence
  source: /note="Description of Artificial Sequence: Synthetic oligonucleotide"
aacatgaaggccaggttgga

SEQ ID NO: 2453 - DNA, 20 bp, Artificial Sequence
  source: /note="Description of Artificial Sequence: Synthetic oligonucleotide"
gaacatgaaggccaggttgg

SEQ ID NO: 2454 - DNA, 20 bp, Artificial Sequence
  source: /note="Description of Artificial Sequence: Synthetic oligonucleotide"
ggaacatgaaggccaggttg

SEQ ID NO: 2455 - DNA, 20 bp, Artificial Sequence
  source: /note="Description of Artificial Sequence: Synthetic oligonucleotide"
cggaacatgaaggccaggtt

SEQ ID NO: 2456 - DNA, 20 bp, Artificial Sequence
  source: /note="Description of Artificial Sequence: Synthetic oligonucleotide"
gcggaacatgaaggccaggt

SEQ ID NO: 2457 - DNA, 20 bp, Artificial Sequence
  source: /note="Description of Artificial Sequence: Synthetic oligonucleotide"
ggcggaacatgaaggccagg

SEQ ID NO: 2458 - DNA, 20 bp, Artificial Sequence
  source: /note="Description of Artificial Sequence: Synthetic oligonucleotide"
aggcggaacatgaaggccag

SEQ ID NO: 2459 - DNA, 20 bp, Artificial Sequence
  source: /note="Description of Artificial Sequence: Synthetic oligonucleotide"
caggcggaacatgaaggcca

SEQ ID NO: 2460 - DNA, 20 bp, Artificial Sequence
  source: /note="Description of Artificial Sequence: Synthetic oligonucleotide"
gcaggcggaacatgaaggcc

SEQ ID NO: 2461 - DNA, 20 bp, Artificial Sequence
  source: /note="Description of Artificial Sequence: Synthetic oligonucleotide"
ggcaggcggaacatgaaggc

SEQ ID NO: 2462 - DNA, 20 bp, Artificial Sequence
  source: /note="Description of Artificial Sequence: Synthetic oligonucleotide"
cggcaggcggaacatgaagg

SEQ ID NO: 2463 - DNA, 20 bp, Artificial Sequence
  source: /note="Description of Artificial Sequence: Synthetic oligonucleotide"
acggcaggcggaacatgaag

SEQ ID NO: 2464 - DNA, 20 bp, Artificial Sequence
  source: /note="Description of Artificial Sequence: Synthetic oligonucleotide"
aacggcaggcggaacatgaa

SEQ ID NO: 2465 - DNA, 20 bp, Artificial Sequence
  source: /note="Description of Artificial Sequence: Synthetic oligonucleotide"
gaacggcaggcggaacatga

SEQ ID NO: 2466 - DNA, 20 bp, Artificial Sequence
  source: /note="Description of Artificial Sequence: Synthetic oligonucleotide"
cgaacggcaggcggaacatg

SEQ ID NO: 2467 - DNA, 20 bp, Artificial Sequence
  source: /note="Description of Artificial Sequence: Synthetic oligonucleotide"
gcgaacggcaggcggaacat

SEQ ID NO: 2468 - DNA, 20 bp, Artificial Sequence
  source: /note="Description of Artificial Sequence: Synthetic oligonucleotide"
ggcgaacggcaggcggaaca

SEQ ID NO: 2469 - DNA, 20 bp, Artificial Sequence
  source: /note="Description of Artificial Sequence: Synthetic oligonucleotide"
cggcgaacggcaggcggaac

SEQ ID NO: 2470 - DNA, 20 bp, Artificial Sequence
  source: /note="Description of Artificial Sequence: Synthetic oligonucleotide"
gcggcgaacggcaggcggaa

SEQ ID NO: 2471 - DNA, 20 bp, Artificial Sequence
  source: /note="Description of Artificial Sequence: Synthetic oligonucleotide"
ctgatgctgaagacgcggcc

SEQ ID NO: 2472 - DNA, 20 bp, Artificial Sequence
  source: /note="Description of Artificial Sequence: Synthetic oligonucleotide"
gctgatgctgaagacgcggc

SEQ ID NO: 2473 - DNA, 20 bp, Artificial Sequence
  source: /note="Description of Artificial Sequence: Synthetic oligonucleotide"
tgctgatgctgaagacgcgg

SEQ ID NO: 2474 - DNA, 20 bp, Artificial Sequence
  source: /note="Description of Artificial Sequence: Synthetic oligonucleotide"
atgctgatgctgaagacgcg

SEQ ID NO: 2475 - DNA, 20 bp, Artificial Sequence
  source: /note="Description of Artificial Sequence: Synthetic oligonucleotide"
catgctgatgctgaagacgc

SEQ ID NO: 2476 - DNA, 20 bp, Artificial Sequence
  source: /note="Description of Artificial Sequence: Synthetic oligonucleotide"
acatgctgatgctgaagacg

SEQ ID NO: 2477 - DNA, 20 bp, Artificial Sequence
  source: /note="Description of Artificial Sequence: Synthetic oligonucleotide"
aacatgctgatgctgaagac

SEQ ID NO: 2478 - DNA, 20 bp, Artificial Sequence
  source: /note="Description of Artificial Sequence: Synthetic oligonucleotide"
caacatgctgatgctgaaga

SEQ ID NO: 2479 - DNA, 20 bp, Artificial Sequence
  source: /note="Description of Artificial Sequence: Synthetic oligonucleotide"
ccaacatgctgatgctgaag

SEQ ID NO: 2480 - DNA, 20 bp, Artificial Sequence
  source: /note="Description of Artificial Sequence: Synthetic oligonucleotide"
tccaacatgctgatgctgaa

SEQ ID NO: 2481 - DNA, 20 bp, Artificial Sequence
  source: /note="Description of Artificial Sequence: Synthetic oligonucleotide"
gtccaacatgctgatgctga

SEQ ID NO: 2482 - DNA, 20 bp, Artificial Sequence
  source: /note="Description of Artificial Sequence: Synthetic oligonucleotide"
tgtccaacatgctgatgctg

SEQ ID NO: 2483 - DNA, 20 bp, Artificial Sequence
  source: /note="Description of Artificial Sequence: Synthetic oligonucleotide"
gtgtccaacatgctgatgct

SEQ ID NO: 2484 - DNA, 20 bp, Artificial Sequence
  source: /note="Description of Artificial Sequence: Synthetic oligonucleotide"
tgtgtccaacatgctgatgc

SEQ ID NO: 2485 - DNA, 20 bp, Artificial Sequence
  source: /note="Description of Artificial Sequence: Synthetic oligonucleotide"
gtgtgtccaacatgctgatg

SEQ ID NO: 2486 - DNA, 20 bp, Artificial Sequence
  source: /note="Description of Artificial Sequence: Synthetic oligonucleotide"
agtgtgtccaacatgctgat

SEQ ID NO: 2487 - DNA, 20 bp, Artificial Sequence
  source: /note="Description of Artificial Sequence: Synthetic oligonucleotide"
cagtgtgtccaacatgctga

SEQ ID NO: 2488 - DNA, 20 bp, Artificial Sequence
  source: /note="Description of Artificial Sequence: Synthetic oligonucleotide"
gcagtgtgtccaacatgctg

SEQ ID NO: 2489 - DNA, 20 bp, Artificial Sequence
  source: /note="Description of Artificial Sequence: Synthetic oligonucleotide"
agcagtgtgtccaacatgct

SEQ ID NO: 2490 - DNA, 20 bp, Artificial Sequence
  source: /note="Description of Artificial Sequence: Synthetic oligonucleotide"
gagcagtgtgtccaacatgc

SEQ ID NO: 2491 - DNA, 20 bp, Artificial Sequence
  source: /note="Description of Artificial Sequence: Synthetic oligonucleotide"
agagcagtgtgtccaacatg

SEQ ID NO: 2492 - DNA, 20 bp, Artificial Sequence
  source: /note="Description of Artificial Sequence: Synthetic oligonucleotide"
tagagcagtgtgtccaacat

SEQ ID NO: 2493 - DNA, 20 bp, Artificial Sequence
  source: /note="Description of Artificial Sequence: Synthetic oligonucleotide"
gtagagcagtgtgtccaaca

SEQ ID NO: 2494 - DNA, 20 bp, Artificial Sequence
  source: /note="Description of Artificial Sequence: Synthetic oligonucleotide"
ggtagagcagtgtgtccaac

SEQ ID NO: 2495 - DNA, 20 bp, Artificial Sequence
  source: /note="Description of Artificial Sequence: Synthetic oligonucleotide"
tggtagagcagtgtgtccaa

SEQ ID NO: 2496 - DNA, 20 bp, Artificial Sequence
  source: /note="Description of Artificial Sequence: Synthetic oligonucleotide"
ctggtagagcagtgtgtcca

SEQ ID NO: 2497 - DNA, 20 bp, Artificial Sequence
  source: /note="Description of Artificial Sequence: Synthetic oligonucleotide"
actggtagagcagtgtgtcc

SEQ ID NO: 2498 - DNA, 20 bp, Artificial Sequence
  source: /note="Description of Artificial Sequence: Synthetic oligonucleotide"
gactggtagagcagtgtgtc

SEQ ID NO: 2499 - DNA, 20 bp, Artificial Sequence
  source: /note="Description of Artificial Sequence: Synthetic oligonucleotide"
ggactggtagagcagtgtgt

SEQ ID NO: 2500 - DNA, 20 bp, Artificial Sequence
  source: /note="Description of Artificial Sequence: Synthetic oligonucleotide"
aggactggtagagcagtgtg

SEQ ID NO: 2501 - DNA, 20 bp, Artificial Sequence
  source: /note="Description of Artificial Sequence: Synthetic oligonucleotide"
aaggactggtagagcagtgt

SEQ ID NO: 2502 - DNA, 20 bp, Artificial Sequence
  source: /note="Description of Artificial Sequence: Synthetic oligonucleotide"
gaaggactggtagagcagtg

SEQ ID NO: 2503 - DNA, 20 bp, Artificial Sequence
  source: /note="Description of Artificial Sequence: Synthetic oligonucleotide"
cgaaggactggtagagcagt

SEQ ID NO: 2504 - DNA, 20 bp, Artificial Sequence
  source: /note="Description of Artificial Sequence: Synthetic oligonucleotide"
acgaaggactggtagagcag

SEQ ID NO: 2505 - DNA, 20 bp, Artificial Sequence
  source: /note="Description of Artificial Sequence: Synthetic oligonucleotide"
cacgaaggactggtagagca

SEQ ID NO: 2506 - DNA, 20 bp, Artificial Sequence
  source: /note="Description of Artificial Sequence: Synthetic oligonucleotide"
ttcacgaaggactggtagag

SEQ ID NO: 2507 - DNA, 20 bp, Artificial Sequence
  source: /note="Description of Artificial Sequence: Synthetic oligonucleotide"
cttcacgaaggactggtaga

SEQ ID NO: 2508 - DNA, 20 bp, Artificial Sequence
  source: /note="Description of Artificial Sequence: Synthetic oligonucleotide"
ccttcacgaaggactggtag

SEQ ID NO: 2509 - DNA, 20 bp, Artificial Sequence
  source: /note="Description of Artificial Sequence: Synthetic oligonucleotide"
tccttcacgaaggactggta

SEQ ID NO: 2510 - DNA, 20 bp, Artificial Sequence
  source: /note="Description of Artificial Sequence: Synthetic oligonucleotide"
gtccttcacgaaggactggt

SEQ ID NO: 2511 - DNA, 20 bp, Artificial Sequence
  source: /note="Description of Artificial Sequence: Synthetic oligonucleotide"
agtccttcacgaaggactgg

SEQ ID NO: 2512 - DNA, 20 bp, Artificial Sequence
  source: /note="Description of Artificial Sequence: Synthetic oligonucleotide"
tagtccttcacgaaggactg

SEQ ID NO: 2513 - DNA, 20 bp, Artificial Sequence
  source: /note="Description of Artificial Sequence: Synthetic oligonucleotide"
gtagtccttcacgaaggact

SEQ ID NO: 2514 - DNA, 20 bp, Artificial Sequence
  source: /note="Description of Artificial Sequence: Synthetic oligonucleotide"
tgtagtccttcacgaaggac

SEQ ID NO: 2515 - DNA, 20 bp, Artificial Sequence
  source: /note="Description of Artificial Sequence: Synthetic oligonucleotide"
atgtagtccttcacgaagga

SEQ ID NO: 2516 - DNA, 20 bp, Artificial Sequence
  source: /note="Description of Artificial Sequence: Synthetic oligonucleotide"
catgtagtccttcacgaagg

SEQ ID NO: 2517 - DNA, 20 bp, Artificial Sequence
  source: /note="Description of Artificial Sequence: Synthetic oligonucleotide"
tcatgtagtccttcacgaag

SEQ ID NO: 2518 - DNA, 20 bp, Artificial Sequence
  source: /note="Description of Artificial Sequence: Synthetic oligonucleotide"
atcatgtagtccttcacgaa

SEQ ID NO: 2519 - DNA, 20 bp, Artificial Sequence
  source: /note="Description of Artificial Sequence: Synthetic oligonucleotide"
gatcatgtagtccttcacga

SEQ ID NO: 2520 - DNA, 20 bp, Artificial Sequence
  source: /note="Description of Artificial Sequence: Synthetic oligonucleotide"
tgatcatgtagtccttcacg

SEQ ID NO: 2521 - DNA, 20 bp, Artificial Sequence
  source: /note="Description of Artificial Sequence: Synthetic oligonucleotide"
gtgatcatgtagtccttcac

SEQ ID NO: 2522 - DNA, 20 bp, Artificial Sequence
  source: /note="Description of Artificial Sequence: Synthetic oligonucleotide"
ggtgatcatgtagtccttca

SEQ ID NO: 2523 - DNA, 20 bp, Artificial Sequence
  source: /note="Description of Artificial Sequence: Synthetic oligonucleotide"
tggtgatcatgtagtccttc

SEQ ID NO: 2524 - DNA, 20 bp, Artificial Sequence
  source: /note="Description of Artificial Sequence: Synthetic oligonucleotide"
atggtgatcatgtagtcctt

SEQ ID NO: 2525 - DNA, 20 bp, Artificial Sequence
  source: /note="Description of Artificial Sequence: Synthetic oligonucleotide"
gatggtgatcatgtagtcct

SEQ ID NO: 2526 - DNA, 20 bp, Artificial Sequence
  source: /note="Description of Artificial Sequence: Synthetic oligonucleotide"
gtgatggtgatcatgtagtc

SEQ ID NO: 2527 - DNA, 20 bp, Artificial Sequence
  source: /note="Description of Artificial Sequence: Synthetic oligonucleotide"
ggtgatggtgatcatgtagt

SEQ ID NO: 2528 - DNA, 20 bp, Artificial Sequence
  source: /note="Description of Artificial Sequence: Synthetic oligonucleotide"
gggtgatggtgatcatgtag

SEQ ID NO: 2529 - DNA, 20 bp, Artificial Sequence
  source: /note="Description of Artificial Sequence: Synthetic oligonucleotide"
cgggtgatggtgatcatgta

SEQ ID NO: 2530 - DNA, 20 bp, Artificial Sequence
  source: /note="Description of Artificial Sequence: Synthetic oligonucleotide"
ccgggtgatggtgatcatgt

SEQ ID NO: 2531 - DNA, 20 bp, Artificial Sequence
  source: /note="Description of Artificial Sequence: Synthetic oligonucleotide"
gccgggtgatggtgatcatg

SEQ ID NO: 2532 - DNA, 20 bp, Artificial Sequence
  source: /note="Description of Artificial Sequence: Synthetic oligonucleotide"
agccgggtgatggtgatcat

SEQ ID NO: 2533 - DNA, 20 bp, Artificial Sequence
  source: /note="Description of Artificial Sequence: Synthetic oligonucleotide"
cagccgggtgatggtgatca

SEQ ID NO: 2534 - DNA, 20 bp, Artificial Sequence
  source: /note="Description of Artificial Sequence: Synthetic oligonucleotide"
gcagccgggtgatggtgatc

SEQ ID NO: 2535 - DNA, 20 bp, Artificial Sequence
  source: /note="Description of Artificial Sequence: Synthetic oligonucleotide"
agcagccgggtgatggtgat

SEQ ID NO: 2536 - DNA, 20 bp, Artificial Sequence
  source: /note="Description of Artificial Sequence: Synthetic oligonucleotide"
cagcagccgggtgatggtga

SEQ ID NO: 2537 - DNA, 20 bp, Artificial Sequence
  source: /note="Description of Artificial Sequence: Synthetic oligonucleotide"
gcagcagccgggtgatggtg

SEQ ID NO: 2538 - DNA, 20 bp, Artificial Sequence
  source: /note="Description of Artificial Sequence: Synthetic oligonucleotide"
agcagcagccgggtgatggt

SEQ ID NO: 2539 - DNA, 20 bp, Artificial Sequence
  source: /note="Description of Artificial Sequence: Synthetic oligonucleotide"
cagcagcagccgggtgatgg

SEQ ID NO: 2540 - DNA, 20 bp, Artificial Sequence
  source: /note="Description of Artificial Sequence: Synthetic oligonucleotide"
ccagcagcagccgggtgatg

SEQ ID NO: 2541 - DNA, 20 bp, Artificial Sequence
  source: /note="Description of Artificial Sequence: Synthetic oligonucleotide"
cccagcagcagccgggtgat

SEQ ID NO: 2542 - DNA, 20 bp, Artificial Sequence
  source: /note="Description of Artificial Sequence: Synthetic oligonucleotide"
gcccagcagcagccgggtga

SEQ ID NO: 2543 - DNA, 20 bp, Artificial Sequence
  source: /note="Description of Artificial Sequence: Synthetic oligonucleotide"
aggcccagcagcagccgggt

SEQ ID NO: 2544 - DNA, 20 bp, Artificial Sequence
  source: /note="Description of Artificial Sequence: Synthetic oligonucleotide"
tccaggcccagcagcagccg

SEQ ID NO: 2545 - DNA, 20 bp, Artificial Sequence
  source: /note="Description of Artificial Sequence: Synthetic oligonucleotide"
gtccaggcccagcagcagcc

SEQ ID NO: 2546 - DNA, 20 bp, Artificial Sequence
  source: /note="Description of Artificial Sequence: Synthetic oligonucleotide"
tgtccaggcccagcagcagc

SEQ ID NO: 2547 - DNA, 20 bp, Artificial Sequence
  source: /note="Description of Artificial Sequence: Synthetic oligonucleotide"
gtgtccaggcccagcagcag

SEQ ID NO: 2548 - DNA, 20 bp, Artificial Sequence
  source: /note="Description of Artificial Sequence: Synthetic oligonucleotide"
ggtgtccaggcccagcagca

SEQ ID NO: 2549 - DNA, 20 bp, Artificial Sequence
  source: /note="Description of Artificial Sequence: Synthetic oligonucleotide"
tggtgtccaggcccagcagc

SEQ ID NO: 2550 - DNA, 20 bp, Artificial Sequence
  source: /note="Description of Artificial Sequence: Synthetic oligonucleotide"
gtggtgtccaggcccagcag

SEQ ID NO: 2551 - DNA, 20 bp, Artificial Sequence
  source: /note="Description of Artificial Sequence: Synthetic oligonucleotide"
cgtggtgtccaggcccagca

SEQ ID NO: 2552 - DNA, 20 bp, Artificial Sequence
  source: /note="Description of Artificial Sequence: Synthetic oligonucleotide"
gcgtggtgtccaggcccagc

SEQ ID NO: 2553 - DNA, 20 bp, Artificial Sequence
  source: /note="Description of Artificial Sequence: Synthetic oligonucleotide"
ggcgtggtgtccaggcccag

SEQ ID NO: 2554 - DNA, 20 bp, Artificial Sequence
  source: /note="Description of Artificial Sequence: Synthetic oligonucleotide"
cggcgtggtgtccaggccca

SEQ ID NO: 2555 - DNA, 20 bp, Artificial Sequence
  source: /note="Description of Artificial Sequence: Synthetic oligonucleotide"
agcccggcgtggtgtccagg

SEQ ID NO: 2556 - DNA, 20 bp, Artificial Sequence
  source: /note="Description of Artificial Sequence: Synthetic oligonucleotide"
gagcccggcgtggtgtccag

SEQ ID NO: 2557 - DNA, 20 bp, Artificial Sequence
  source: /note="Description of Artificial Sequence: Synthetic oligonucleotide"
cgagcccggcgtggtgtcca

SEQ ID NO: 2558 - DNA, 20 bp, Artificial Sequence
  source: /note="Description of Artificial Sequence: Synthetic oligonucleotide"
taccccgagcccggcgtggt

SEQ ID NO: 2559 - DNA, 20 bp, Artificial Sequence
  source: /note="Description of Artificial Sequence: Synthetic oligonucleotide"
aggtaccccgagcccggcgt

SEQ ID NO: 2560 - DNA, 20 bp, Artificial Sequence
  source: /note="Description of Artificial Sequence: Synthetic oligonucleotide"
agaggtaccccgagcccggc

SEQ ID NO: 2561 - DNA, 20 bp, Artificial Sequence
  source: /note="Description of Artificial Sequence: Synthetic oligonucleotide"
cagaggtaccccgagcccgg

SEQ ID NO: 2562 - DNA, 20 bp, Artificial Sequence
  source: /note="Description of Artificial Sequence: Synthetic oligonucleotide"
acagaggtaccccgagcccg

SEQ ID NO: 2563 - DNA, 20 bp, Artificial Sequence
  source: /note="Description of Artificial Sequence: Synthetic oligonucleotide"
cacagaggtaccccgagccc

SEQ ID NO: 2564 - DNA, 20 bp, Artificial Sequence
  source: /note="Description of Artificial Sequence: Synthetic oligonucleotide"
gcacagaggtaccccgagcc

SEQ ID NO: 2565 - DNA, 20 bp, Artificial Sequence
  source: /note="Description of Artificial Sequence: Synthetic oligonucleotide"
ggcacagaggtaccccgagc

SEQ ID NO: 2566 - DNA, 20 bp, Artificial Sequence
  source: /note="Description of Artificial Sequence: Synthetic oligonucleotide"
tggcacagaggtaccccgag

SEQ ID NO: 2567 - DNA, 20 bp, Artificial Sequence
  source: /note="Description of Artificial Sequence: Synthetic oligonucleotide"
atggcacagaggtaccccga

SEQ ID NO: 2568 - DNA, 20 bp, Artificial Sequence
  source: /note="Description of Artificial Sequence: Synthetic oligonucleotide"
catggcacagaggtaccccg

SEQ ID NO: 2569 - DNA, 20 bp, Artificial Sequence
  source: /note="Description of Artificial Sequence: Synthetic oligonucleotide"
tcatggcacagaggtacccc

SEQ ID NO: 2570 - DNA, 20 bp, Artificial Sequence
  source: /note="Description of Artificial Sequence: Synthetic oligonucleotide"
tttcatggcacagaggtacc

SEQ ID NO: 2571 - DNA, 20 bp, Artificial Sequence
  source: /note="Description of Artificial Sequence: Synthetic oligonucleotide"
ttttcatggcacagaggtac

SEQ ID NO: 2572 - DNA, 20 bp, Artificial Sequence
  source: /note="Description of Artificial Sequence: Synthetic oligonucleotide"
attttcatggcacagaggta

SEQ ID NO: 2573 - DNA, 20 bp, Artificial Sequence
  source: /note="Description of Artificial Sequence: Synthetic oligonucleotide"
gattttcatggcacagaggt

SEQ ID NO: 2574 - DNA, 20 bp, Artificial Sequence
  source: /note="Description of Artificial Sequence: Synthetic oligonucleotide"
tgattttcatggcacagagg

SEQ ID NO: 2575 - DNA, 20 bp, Artificial Sequence
  source: /note="Description of Artificial Sequence: Synthetic oligonucleotide"
gtgattttcatggcacagag

SEQ ID NO: 2576 - DNA, 20 bp, Artificial Sequence
  source: /note="Description of Artificial Sequence: Synthetic oligonucleotide"
ggtgattttcatggcacaga

SEQ ID NO: 2577 - DNA, 20 bp, Artificial Sequence
  source: /note="Description of Artificial Sequence: Synthetic oligonucleotide"
cggtgattttcatggcacag

SEQ ID NO: 2578 - DNA, 20 bp, Artificial Sequence
  source: /note="Description of Artificial Sequence: Synthetic oligonucleotide"
tcggtgattttcatggcaca

SEQ ID NO: 2579 - DNA, 20 bp, Artificial Sequence
  source: /note="Description of Artificial Sequence: Synthetic oligonucleotide"
ctcggtgattttcatggcac

SEQ ID NO: 2580 - DNA, 20 bp, Artificial Sequence
  source: /note="Description of Artificial Sequence: Synthetic oligonucleotide"
cctcggtgattttcatggca

SEQ ID NO: 2581 - DNA, 20 bp, Artificial Sequence
  source: /note="Description of Artificial Sequence: Synthetic oligonucleotide"
ccctcggtgattttcatggc

SEQ ID NO: 2582 - DNA, 20 bp, Artificial Sequence
  source: /note="Description of Artificial Sequence: Synthetic oligonucleotide"
gccctcggtgattttcatgg

SEQ ID NO: 2583 - DNA, 20 bp, Artificial Sequence
  source: /note="Description of Artificial Sequence: Synthetic oligonucleotide"
cgccctcggtgattttcatg

SEQ ID NO: 2584 - DNA, 20 bp, Artificial Sequence
  source: /note="Description of Artificial Sequence: Synthetic oligonucleotide"
tcgccctcggtgattttcat

SEQ ID NO: 2585 - DNA, 20 bp, Artificial Sequence
  source: /note="Description of Artificial Sequence: Synthetic oligonucleotide"
gtcgccctcggtgattttca

SEQ ID NO: 2586 - DNA, 20 bp, Artificial Sequence
  source: /note="Description of Artificial Sequence: Synthetic oligonucleotide"
ggtcgccctcggtgattttc

SEQ ID NO: 2587 - DNA, 20 bp, Artificial Sequence
  source: /note="Description of Artificial Sequence: Synthetic oligonucleotide"
aggtcgccctcggtgatttt

SEQ ID NO: 2588 - DNA, 20 bp, Artificial Sequence
  source: /note="Description of Artificial Sequence: Synthetic oligonucleotide"
caggtcgccctcggtgattt

SEQ ID NO: 2589 - DNA, 20 bp, Artificial Sequence
  source: /note="Description of Artificial Sequence: Synthetic oligonucleotide"
cacaggtcgccctcggtgat

SEQ ID NO: 2590 - DNA, 20 bp, Artificial Sequence
  source: /note="Description of Artificial Sequence: Synthetic oligonucleotide"
ccacaggtcgccctcggtga

SEQ ID NO: 2591 - DNA, 20 bp, Artificial Sequence
  source: /note="Description of Artificial Sequence: Synthetic oligonucleotide"
tccacaggtcgccctcggtg

SEQ ID NO: 2592 - DNA, 20 bp, Artificial Sequence
  source: /note="Description of Artificial Sequence: Synthetic oligonucleotide"
atccacaggtcgccctcggt

SEQ ID NO: 2593 - DNA, 20 bp, Artificial Sequence
  source: /note="Description of Artificial Sequence: Synthetic oligonucleotide"
gatccacaggtcgccctcgg

SEQ ID NO: 2594 - DNA, 20 bp, Artificial Sequence
  source: /note="Description of Artificial Sequence: Synthetic oligonucleotide"
ggatccacaggtcgccctcg

SEQ ID NO: 2595 - DNA, 20 bp, Artificial Sequence
  source: /note="Description of Artificial Sequence: Synthetic oligonucleotide"
cggatccacaggtcgccctc

SEQ ID NO: 2596 - DNA, 20 bp, Artificial Sequence
  source: /note="Description of Artificial Sequence: Synthetic oligonucleotide"
gcggatccacaggtcgccct

SEQ ID NO: 2597 - DNA, 20 bp, Artificial Sequence
  source: /note="Description of Artificial Sequence: Synthetic oligonucleotide"
tgcggatccacaggtcgccc

SEQ ID NO: 2598 - DNA, 20 bp, Artificial Sequence
  source: /note="Description of Artificial Sequence: Synthetic oligonucleotide"
gtgcggatccacaggtcgcc

SEQ ID NO: 2599 - DNA, 20 bp, Artificial Sequence
  source: /note="Description of Artificial Sequence: Synthetic oligonucleotide"
cgtgcggatccacaggtcgc

SEQ ID NO: 2600 - DNA, 20 bp, Artificial Sequence
  source: /note="Description of Artificial Sequence: Synthetic oligonucleotide"
acgtgcggatccacaggtcg

SEQ ID NO: 2601 - DNA, 20 bp, Artificial Sequence
  source: /note="Description of Artificial Sequence: Synthetic oligonucleotide"
tacgtgcggatccacaggtc

SEQ ID NO: 2602 - DNA, 20 bp, Artificial Sequence
  source: /note="Description of Artificial Sequence: Synthetic oligonucleotide"
gtacgtgcggatccacaggt

SEQ ID NO: 2603 - DNA, 20 bp, Artificial Sequence
  source: /note="Description of Artificial Sequence: Synthetic oligonucleotide"
cgtacgtgcggatccacagg

SEQ ID NO: 2604 - DNA, 20 bp, Artificial Sequence
  source: /note="Description of Artificial Sequence: Synthetic oligonucleotide"
ccgtacgtgcggatccacag

SEQ ID NO: 2605 - DNA, 20 bp, Artificial Sequence
  source: /note="Description of Artificial Sequence: Synthetic oligonucleotide"
gccgtacgtgcggatccaca

SEQ ID NO: 2606 - DNA, 20 bp, Artificial Sequence
  source: /note="Description of Artificial Sequence: Synthetic oligonucleotide"
ggccgtacgtgcggatccac

SEQ ID NO: 2607 - DNA, 20 bp, Artificial Sequence
  source: /note="Description of Artificial Sequence: Synthetic oligonucleotide"
agcttctggaagaggcggcc

SEQ ID NO: 2608 - DNA, 20 bp, Artificial Sequence
  source: /note="Description of Artificial Sequence: Synthetic oligonucleotide"
gagcttctggaagaggcggc

SEQ ID NO: 2609 - DNA, 20 bp, Artificial Sequence
  source: /note="Description of Artificial Sequence: Synthetic oligonucleotide"
agagcttctggaagaggcgg

SEQ ID NO: 2610 - DNA, 20 bp, Artificial Sequence
  source: /note="Description of Artificial Sequence: Synthetic oligonucleotide"
cagagcttctggaagaggcg

SEQ ID NO: 2611 - DNA, 20 bp, Artificial Sequence
  source: /note="Description of Artificial Sequence: Synthetic oligonucleotide"
gcagagcttctggaagaggc

SEQ ID NO: 2612 - DNA, 20 bp, Artificial Sequence
  source: /note="Description of Artificial Sequence: Synthetic oligonucleotide"
agcagagcttctggaagagg

SEQ ID NO: 2613 - DNA, 20 bp, Artificial Sequence
  source: /note="Description of Artificial Sequence: Synthetic oligonucleotide"
gagcagagcttctggaagag

SEQ ID NO: 2614 - DNA, 20 bp, Artificial Sequence
  source: /note="Description of Artificial Sequence: Synthetic oligonucleotide"
ggagcagagcttctggaaga

SEQ ID NO: 2615 - DNA, 20 bp, Artificial Sequence
  source: /note="Description of Artificial Sequence: Synthetic oligonucleotide"
aggagcagagcttctggaag

SEQ ID NO: 2616 - DNA, 20 bp, Artificial Sequence
  source: /note="Description of Artificial Sequence: Synthetic oligonucleotide"
gaggagcagagcttctggaa

SEQ ID NO: 2617 - DNA, 20 bp, Artificial Sequence
  source: /note="Description of Artificial Sequence: Synthetic oligonucleotide"
ggaggagcagagcttctgga

SEQ ID NO: 2618 - DNA, 20 bp, Artificial Sequence
  source: /note="Description of Artificial Sequence: Synthetic oligonucleotide"
tggaggagcagagcttctgg

SEQ ID NO: 2619 - DNA, 20 bp, Artificial Sequence
  source: /note="Description of Artificial Sequence: Synthetic oligonucleotide"
ctggaggagcagagcttctg

SEQ ID NO: 2620 - DNA, 20 bp, Artificial Sequence
  source: /note="Description of Artificial Sequence: Synthetic oligonucleotide"
gctggaggagcagagcttct

SEQ ID NO: 2621 - DNA, 20 bp, Artificial Sequence
  source: /note="Description of Artificial Sequence: Synthetic oligonucleotide"
cgctggaggagcagagcttc

SEQ ID NO: 2622 - DNA, 20 bp, Artificial Sequence
  source: /note="Description of Artificial Sequence: Synthetic oligonucleotide"
gcgctggaggagcagagctt

SEQ ID NO: 2623 - DNA, 20 bp, Artificial Sequence
  source: /note="Description of Artificial Sequence: Synthetic oligonucleotide"
ggcgctggaggagcagagct

SEQ ID NO: 2624 - DNA, 20 bp, Artificial Sequence
  source: /note="Description of Artificial Sequence: Synthetic oligonucleotide"
cggcgctggaggagcagagc

SEQ ID NO: 2625 - DNA, 20 bp, Artificial Sequence
  source: /note="Description of Artificial Sequence: Synthetic oligonucleotide"
tcggcgctggaggagcagag

SEQ ID NO: 2626 - DNA, 20 bp, Artificial Sequence
  source: /note="Description of Artificial Sequence: Synthetic oligonucleotide"
ctcggcgctggaggagcaga

SEQ ID NO: 2627 - DNA, 20 bp, Artificial Sequence
  source: /note="Description of Artificial Sequence: Synthetic oligonucleotide"
tctcggcgctggaggagcag

SEQ ID NO: 2628 - DNA, 20 bp, Artificial Sequence
  source: /note="Description of Artificial Sequence: Synthetic oligonucleotide"
atctcggcgctggaggagca

SEQ ID NO: 2629 - DNA, 20 bp, Artificial Sequence
  source: /note="Description of Artificial Sequence: Synthetic oligonucleotide"
gatctcggcgctggaggagc

SEQ ID NO: 2630 - DNA, 20 bp, Artificial Sequence
  source: /note="Description of Artificial Sequence: Synthetic oligonucleotide"
ggatctcggcgctggaggag

SEQ ID NO: 2631 - DNA, 20 bp, Artificial Sequence
  source: /note="Description of Artificial Sequence: Synthetic oligonucleotide"
gggatctcggcgctggagga

SEQ ID NO: 2632 - DNA, 20 bp, Artificial Sequence
  source: /note="Description of Artificial Sequence: Synthetic oligonucleotide"
gtccggtagatgccaatggg

SEQ ID NO: 2633 - DNA, 20 bp, Artificial Sequence
  source: /note="Description of Artificial Sequence: Synthetic oligonucleotide"
tgtccggtagatgccaatgg

SEQ ID NO: 2634 - DNA, 20 bp, Artificial Sequence
  source: /note="Description of Artificial Sequence: Synthetic oligonucleotide"
ctgtccggtagatgccaatg

SEQ ID NO: 2635 - DNA, 20 bp, Artificial Sequence
  source: /note="Description of Artificial Sequence: Synthetic oligonucleotide"
tctgtccggtagatgccaat

SEQ ID NO: 2636 - DNA, 20 bp, Artificial Sequence
  source: /note="Description of Artificial Sequence: Synthetic oligonucleotide"
ctctgtccggtagatgccaa

SEQ ID NO: 2637 - DNA, 20 bp, Artificial Sequence
  source: /note="Description of Artificial Sequence: Synthetic oligonucleotide"
tctctgtccggtagatgcca

SEQ ID NO: 2638 - DNA, 20 bp, Artificial Sequence
  source: /note="Description of Artificial Sequence: Synthetic oligonucleotide"
ctctctgtccggtagatgcc

SEQ ID NO: 2639 - DNA, 20 bp, Artificial Sequence
  source: /note="Description of Artificial Sequence: Synthetic oligonucleotide"
ggctctctgtccggtagatg

SEQ ID NO: 2640 - DNA, 20 bp, Artificial Sequence
  source: /note="Description of Artificial Sequence: Synthetic oligonucleotide"
tggctctctgtccggtagat

SEQ ID NO: 2641 - DNA, 20 bp, Artificial Sequence
  source: /note="Description of Artificial Sequence: Synthetic oligonucleotide"
gtggctctctgtccggtaga

SEQ ID NO: 2642 - DNA, 20 bp, Artificial Sequence
  source: /note="Description of Artificial Sequence: Synthetic oligonucleotide"
cgtggctctctgtccggtag

SEQ ID NO: 2643 - DNA, 20 bp, Artificial Sequence
  source: /note="Description of Artificial Sequence: Synthetic oligonucleotide"
acgtggctctctgtccggta

SEQ ID NO: 2644 - DNA, 20 bp, Artificial Sequence
  source: /note="Description of Artificial Sequence: Synthetic oligonucleotide"
gacgtggctctctgtccggt

SEQ ID NO: 2645 - DNA, 20 bp, Artificial Sequence
  source: /note="Description of Artificial Sequence: Synthetic oligonucleotide"
agacgtggctctctgtccgg

SEQ ID NO: 2646 - DNA, 20 bp, Artificial Sequence
  source: /note="Description of Artificial Sequence: Synthetic oligonucleotide"
aagacgtggctctctgtccg

SEQ ID NO: 2647 - DNA, 20 bp, Artificial Sequence
  source: /note="Description of Artificial Sequence: Synthetic oligonucleotide"
gaagacgtggctctctgtcc

SEQ ID NO: 2648 - DNA, 20 bp, Artificial Sequence
  source: /note="Description of Artificial Sequence: Synthetic oligonucleotide"
agaagacgtggctctctgtc

SEQ ID NO: 2649 - DNA, 20 bp, Artificial Sequence
  source: /note="Description of Artificial Sequence: Synthetic oligonucleotide"
gagaagacgtggctctctgt

SEQ ID NO: 2650 - DNA, 20 bp, Artificial Sequence
  source: /note="Description of Artificial Sequence: Synthetic oligonucleotide"
ggagaagacgtggctctctg

SEQ ID NO: 2651 - DNA, 20 bp, Artificial Sequence
  source: /note="Description of Artificial Sequence: Synthetic oligonucleotide"
tggagaagacgtggctctct

SEQ ID NO: 2652 - DNA, 20 bp, Artificial Sequence
  source: /note="Description of Artificial Sequence: Synthetic oligonucleotide"
gtggagaagacgtggctctc

SEQ ID NO: 2653 - DNA, 20 bp, Artificial Sequence
  source: /note="Description of Artificial Sequence: Synthetic oligonucleotide"
ggtggagaagacgtggctct

SEQ ID NO: 2654 - DNA, 20 bp, Artificial Sequence
  source: /note="Description of Artificial Sequence: Synthetic oligonucleotide"
aggtggagaagacgtggctc

SEQ ID NO: 2655 - DNA, 20 bp, Artificial Sequence
  source: /note="Description of Artificial Sequence: Synthetic oligonucleotide"
gaggtggagaagacgtggct

SEQ ID NO: 2656 - DNA, 20 bp, Artificial Sequence
  source: /note="Description of Artificial Sequence: Synthetic oligonucleotide"
cgaggtggagaagacgtggc

SEQ ID NO: 2657 - DNA, 20 bp, Artificial Sequence
  source: /note="Description of Artificial Sequence: Synthetic oligonucleotide"
ccgaggtggagaagacgtgg

SEQ ID NO: 2658 - DNA, 20 bp, Artificial Sequence
  source: /note="Description of Artificial Sequence: Synthetic oligonucleotide"
ctccgaggtggagaagacgt

SEQ ID NO: 2659 - DNA, 20 bp, Artificial Sequence
  source: /note="Description of Artificial Sequence: Synthetic oligonucleotide"
gctccgaggtggagaagacg

SEQ ID NO: 2660 - DNA, 20 bp, Artificial Sequence
  source: /note="Description of Artificial Sequence: Synthetic oligonucleotide"
ggctccgaggtggagaagac

SEQ ID NO: 2661 - DNA, 20 bp, Artificial Sequence
  source: /note="Description of Artificial Sequence: Synthetic oligonucleotide"
gggctccgaggtggagaaga

SEQ ID NO: 2662 - DNA, 20 bp, Artificial Sequence
  source: /note="Description of Artificial Sequence: Synthetic oligonucleotide"
ctgggctctgaggtcgtggg

SEQ ID NO: 2663 - DNA, 20 bp, Artificial Sequence
  source: /note="Description of Artificial Sequence: Synthetic oligonucleotide"
actgggctctgaggtcgtgg

SEQ ID NO: 2664 - DNA, 20 bp, Artificial Sequence
  source: /note="Description of Artificial Sequence: Synthetic oligonucleotide"
gactgggctctgaggtcgtg

SEQ ID NO: 2665 - DNA, 20 bp, Artificial Sequence
  source: /note="Description of Artificial Sequence: Synthetic oligonucleotide"
ggactgggctctgaggtcgt

SEQ ID NO: 2666 - DNA, 20 bp, Artificial Sequence
  source: /note="Description of Artificial Sequence: Synthetic oligonucleotide"
gggactgggctctgaggtcg

SEQ ID NO: 2667 - DNA, 20 bp, Artificial Sequence
  source: /note="Description of Artificial Sequence: Synthetic oligonucleotide"
tgggactgggctctgaggtc

SEQ ID NO: 2668 - DNA, 20 bp, Artificial Sequence
  source: /note="Description of Artificial Sequence: Synthetic oligonucleotide"
ctgggactgggctctgaggt

SEQ ID NO: 2669 - DNA, 20 bp, Artificial Sequence
  source: /note="Description of Artificial Sequence: Synthetic oligonucleotide"
tctgggactgggctctgagg

SEQ ID NO: 2670 - DNA, 20 bp, Artificial Sequence
  source: /note="Description of Artificial Sequence: Synthetic oligonucleotide"
atctgggactgggctctgag

SEQ ID NO: 2671 - DNA, 20 bp, Artificial Sequence
  source: /note="Description of Artificial Sequence: Synthetic oligonucleotide"
agatctgggactgggctctg

SEQ ID NO: 2672 - DNA, 20 bp, Artificial Sequence
  source: /note="Description of Artificial Sequence: Synthetic oligonucleotide"
gagatctgggactgggctct

SEQ ID NO: 2673 - DNA, 20 bp, Artificial Sequence
  source: /note="Description of Artificial Sequence: Synthetic oligonucleotide"
cgagatctgggactgggctc

SEQ ID NO: 2674 - DNA, 20 bp, Artificial Sequence
  source: /note="Description of Artificial Sequence: Synthetic oligonucleotide"
ccgagatctgggactgggct

SEQ ID NO: 2675 - DNA, 20 bp, Artificial Sequence
  source: /note="Description of Artificial Sequence: Synthetic oligonucleotide"
accgagatctgggactgggc

SEQ ID NO: 2676 - DNA, 20 bp, Artificial Sequence
  source: /note="Description of Artificial Sequence: Synthetic oligonucleotide"
caccgagatctgggactggg

SEQ ID NO: 2677 - DNA, 20 bp, Artificial Sequence
  source: /note="Description of Artificial Sequence: Synthetic oligonucleotide"
tcaccgagatctgggactgg

SEQ ID NO: 2678 - DNA, 20 bp, Artificial Sequence
  source: /note="Description of Artificial Sequence: Synthetic oligonucleotide"
ttcaccgagatctgggactg

SEQ ID NO: 2679 - DNA, 20 bp, Artificial Sequence
  source: /note="Description of Artificial Sequence: Synthetic oligonucleotide"
gttcaccgagatctgggact

SEQ ID NO: 2680 - DNA, 20 bp, Artificial Sequence
  source: /note="Description of Artificial Sequence: Synthetic oligonucleotide"
cgttcaccgagatctgggac

SEQ ID NO: 2681 - DNA, 20 bp, Artificial Sequence
  source: /note="Description of Artificial Sequence: Synthetic oligonucleotide"
acgttcaccgagatctggga

SEQ ID NO: 2682 - DNA, 20 bp, Artificial Sequence
  source: /note="Description of Artificial Sequence: Synthetic oligonucleotide"
cacgttcaccgagatctggg

SEQ ID NO: 2683 - DNA, 20 bp, Artificial Sequence
  source: /note="Description of Artificial Sequence: Synthetic oligonucleotide"
ccacgttcaccgagatctgg

SEQ ID NO: 2684 - DNA, 20 bp, Artificial Sequence
  source: /note="Description of Artificial Sequence: Synthetic oligonucleotide"
tccacgttcaccgagatctg

SEQ ID NO: 2685 - DNA, 20 bp, Artificial Sequence
  source: /note="Description of Artificial Sequence: Synthetic oligonucleotide"
ctccacgttcaccgagatct

SEQ ID NO: 2686 - DNA, 20 bp, Artificial Sequence
  source: /note="Description of Artificial Sequence: Synthetic oligonucleotide"
cctccacgttcaccgagatc

SEQ ID NO: 2687 - DNA, 20 bp, Artificial Sequence
  source: /note="Description of Artificial Sequence: Synthetic oligonucleotide"
tcctccacgttcaccgagat

SEQ ID NO: 2688 - DNA, 20 bp, Artificial Sequence
  source: /note="Description of Artificial Sequence: Synthetic oligonucleotide"
gtcctccacgttcaccgaga

SEQ ID NO: 2689 - DNA, 20 bp, Artificial Sequence
  source: /note="Description of Artificial Sequence: Synthetic oligonucleotide"
agtcctccacgttcaccgag

SEQ ID NO: 2690 - DNA, 20 bp, Artificial Sequence
  source: /note="Description of Artificial Sequence: Synthetic oligonucleotide"
cagtcctccacgttcaccga

SEQ ID NO: 2691 - DNA, 20 bp, Artificial Sequence
  source: /note="Description of Artificial Sequence: Synthetic oligonucleotide"
acagtcctccacgttcaccg

SEQ ID NO: 2692 - DNA, 20 bp, Artificial Sequence
  source: /note="Description of Artificial Sequence: Synthetic oligonucleotide"
cacagtcctccacgttcacc

SEQ ID NO: 2693 - DNA, 20 bp, Artificial Sequence
  source: /note="Description of Artificial Sequence: Synthetic oligonucleotide"
tcacagtcctccacgttcac

SEQ ID NO: 2694 - DNA, 20 bp, Artificial Sequence
  source: /note="Description of Artificial Sequence: Synthetic oligonucleotide"
ctcacagtcctccacgttca

SEQ ID NO: 2695 - DNA, 20 bp, Artificial Sequence
  source: /note="Description of Artificial Sequence: Synthetic oligonucleotide"
cctcacagtcctccacgttc

SEQ ID NO: 2696 - DNA, 20 bp, Artificial Sequence
  source: /note="Description of Artificial Sequence: Synthetic oligonucleotide"
tcctcacagtcctccacgtt

SEQ ID NO: 2697 - DNA, 20 bp, Artificial Sequence
  source: /note="Description of Artificial Sequence: Synthetic oligonucleotide"
gtcctcacagtcctccacgt

SEQ ID NO: 2698 - DNA, 20 bp, Artificial Sequence
  source: /note="Description of Artificial Sequence: Synthetic oligonucleotide"
tgtcctcacagtcctccacg

SEQ ID NO: 2699 - DNA, 20 bp, Artificial Sequence
  source: /note="Description of Artificial Sequence: Synthetic oligonucleotide"
gtgtcctcacagtcctccac

SEQ ID NO: 2700 - DNA, 20 bp, Artificial Sequence
  source: /note="Description of Artificial Sequence: Synthetic oligonucleotide"
tgtgtcctcacagtcctcca

SEQ ID NO: 2701 - DNA, 20 bp, Artificial Sequence
  source: /note="Description of Artificial Sequence: Synthetic oligonucleotide"
gtgtgtcctcacagtcctcc

SEQ ID NO: 2702 - DNA, 20 bp, Artificial Sequence
  source: /note="Description of Artificial Sequence: Synthetic oligonucleotide"
cgtgtgtcctcacagtcctc

SEQ ID NO: 2703 - DNA, 20 bp, Artificial Sequence
  source: /note="Description of Artificial Sequence: Synthetic oligonucleotide"
ccgtgtgtcctcacagtcct

SEQ ID NO: 2704 - DNA, 20 bp, Artificial Sequence
  source: /note="Description of Artificial Sequence: Synthetic oligonucleotide"
cccgtgtgtcctcacagtcc

SEQ ID NO: 2705 - DNA, 20 bp, Artificial Sequence
  source: /note="Description of Artificial Sequence: Synthetic oligonucleotide"
tcccgtgtgtcctcacagtc

SEQ ID NO: 2706 - DNA, 20 bp, Artificial Sequence
  source: /note="Description of Artificial Sequence: Synthetic oligonucleotide"
cttcccgtgtgtcctcacag

SEQ ID NO: 2707 - DNA, 20 bp, Artificial Sequence
  source: /note="Description of Artificial Sequence: Synthetic oligonucleotide"
acttcccgtgtgtcctcaca

SEQ ID NO: 2708 - DNA, 20 bp, Artificial Sequence
  source: /note="Description of Artificial Sequence: Synthetic oligonucleotide"
cacttcccgtgtgtcctcac

SEQ ID NO: 2709 - DNA, 20 bp, Artificial Sequence
  source: /note="Description of Artificial Sequence: Synthetic oligonucleotide"
tcacttcccgtgtgtcctca

SEQ ID NO: 2710 - DNA, 20 bp, Artificial Sequence
  source: /note="Description of Artificial Sequence: Synthetic oligonucleotide"
ttcacttcccgtgtgtcctc

SEQ ID NO: 2711 - DNA, 20 bp, Artificial Sequence
  source: /note="Description of Artificial Sequence: Synthetic oligonucleotide"
cttcacttcccgtgtgtcct

SEQ ID NO: 2712 - DNA, 20 bp, Artificial Sequence
  source: /note="Description of Artificial Sequence: Synthetic oligonucleotide"
ccttcacttcccgtgtgtcc

SEQ ID NO: 2713 - DNA, 20 bp, Artificial Sequence
  source: /note="Description of Artificial Sequence: Synthetic oligonucleotide"
cccttcacttcccgtgtgtc

SEQ ID NO: 2714 - DNA, 20 bp, Artificial Sequence
  source: /note="Description of Artificial Sequence: Synthetic oligonucleotide"
ccccttcacttcccgtgtgt

SEQ ID NO: 2715 - DNA, 20 bp, Artificial Sequence
  source: /note="Description of Artificial Sequence: Synthetic oligonucleotide"
gccccttcacttcccgtgtg

SEQ ID NO: 2716 - DNA, 20 bp, Artificial Sequence
  source: /note="Description of Artificial Sequence: Synthetic oligonucleotide"
ggccccttcacttcccgtgt

SEQ ID NO: 2717 - DNA, 20 bp, Artificial Sequence
  source: /note="Description of Artificial Sequence: Synthetic oligonucleotide"
agctgcctccggtgccagcg

SEQ ID NO: 2718 - DNA, 20 bp, Artificial Sequence
  source: /note="Description of Artificial Sequence: Synthetic oligonucleotide"
gagctgcctccggtgccagc

SEQ ID NO: 2719 - DNA, 20 bp, Artificial Sequence
  source: /note="Description of Artificial Sequence: Synthetic oligonucleotide"
ggagctgcctccggtgccag

SEQ ID NO: 2720 - DNA, 20 bp, Artificial Sequence
  source: /note="Description of Artificial Sequence: Synthetic oligonucleotide"
gggagctgcctccggtgcca

SEQ ID NO: 2721 - DNA, 20 bp, Artificial Sequence
  source: /note="Description of Artificial Sequence: Synthetic oligonucleotide"
tgggagctgcctccggtgcc

SEQ ID NO: 2722 - DNA, 20 bp, Artificial Sequence
  source: /note="Description of Artificial Sequence: Synthetic oligonucleotide"
ctgggagctgcctccggtgc

SEQ ID NO: 2723 - DNA, 20 bp, Artificial Sequence
  source: /note="Description of Artificial Sequence: Synthetic oligonucleotide"
cctgggagctgcctccggtg

SEQ ID NO: 2724 - DNA, 20 bp, Artificial Sequence
  source: /note="Description of Artificial Sequence: Synthetic oligonucleotide"
ccctgggagctgcctccggt

SEQ ID NO: 2725 - DNA, 20 bp, Artificial Sequence
  source: /note="Description of Artificial Sequence: Synthetic oligonucleotide"
tgtggcggccctgggagctg

SEQ ID NO: 2726 - DNA, 20 bp, Artificial Sequence
  source: /note="Description of Artificial Sequence: Synthetic oligonucleotide"
gtgtggcggccctgggagct

SEQ ID NO: 2727 - DNA, 20 bp, Artificial Sequence
  source: /note="Description of Artificial Sequence: Synthetic oligonucleotide"
agcagtgggtgctctgcggg

SEQ ID NO: 2728 - DNA, 20 bp, Artificial Sequence
  source: /note="Description of Artificial Sequence: Synthetic oligonucleotide"
tagcagtgggtgctctgcgg

SEQ ID NO: 2729 - DNA, 20 bp, Artificial Sequence
  source: /note="Description of Artificial Sequence: Synthetic oligonucleotide"
gtagcagtgggtgctctgcg

SEQ ID NO: 2730 - DNA, 20 bp, Artificial Sequence
  source: /note="Description of Artificial Sequence: Synthetic oligonucleotide"
cgtagcagtgggtgctctgc

SEQ ID NO: 2731 - DNA, 20 bp, Artificial Sequence
  source: /note="Description of Artificial Sequence: Synthetic oligonucleotide"
ccgtagcagtgggtgctctg

SEQ ID NO: 2732 - DNA, 20 bp, Artificial Sequence
  source: /note="Description of Artificial Sequence: Synthetic oligonucleotide"
gccgtagcagtgggtgctct

SEQ ID NO: 2733 - DNA, 20 bp, Artificial Sequence
  source: /note="Description of Artificial Sequence: Synthetic oligonucleotide"
cgccgtagcagtgggtgctc

SEQ ID NO: 2734 - DNA, 20 bp, Artificial Sequence
  source: /note="Description of Artificial Sequence: Synthetic oligonucleotide"
gcgccgtagcagtgggtgct

SEQ ID NO: 2735 - DNA, 20 bp, Artificial Sequence
  source: /note="Description of Artificial Sequence: Synthetic oligonucleotide"
tgcgccgtagcagtgggtgc

SEQ ID NO: 2736 - DNA, 20 bp, Artificial Sequence
  source: /note="Description of Artificial Sequence: Synthetic oligonucleotide"
ttgcgccgtagcagtgggtg

SEQ ID NO: 2737 - DNA, 20 bp, Artificial Sequence
  source: /note="Description of Artificial Sequence: Synthetic oligonucleotide"
cttgcgccgtagcagtgggt

SEQ ID NO: 2738 - DNA, 20 bp, Artificial Sequence
  source: /note="Description of Artificial Sequence: Synthetic oligonucleotide"
tcttgcgccgtagcagtggg

SEQ ID NO: 2739 - DNA, 20 bp, Artificial Sequence
  source: /note="Description of Artificial Sequence: Synthetic oligonucleotide"
ctcttgcgccgtagcagtgg

SEQ ID NO: 2740 - DNA, 20 bp, Artificial Sequence
  source: /note="Description of Artificial Sequence: Synthetic oligonucleotide"
gctcttgcgccgtagcagtg

SEQ ID NO: 2741 - DNA, 20 bp, Artificial Sequence
  source: /note="Description of Artificial Sequence: Synthetic oligonucleotide"
ggctcttgcgccgtagcagt

SEQ ID NO: 2742 - DNA, 20 bp, Artificial Sequence
  source: /note="Description of Artificial Sequence: Synthetic oligonucleotide"
aggctcttgcgccgtagcag

SEQ ID NO: 2743 - DNA, 20 bp, Artificial Sequence
  source: /note="Description of Artificial Sequence: Synthetic oligonucleotide"
caggctcttgcgccgtagca

SEQ ID NO: 2744 - DNA, 20 bp, Artificial Sequence
  source: /note="Description of Artificial Sequence: Synthetic oligonucleotide"
gcaggctcttgcgccgtagc

SEQ ID NO: 2745 - DNA, 20 bp, Artificial Sequence
  source: /note="Description of Artificial Sequence: Synthetic oligonucleotide"
tgcaggctcttgcgccgtag

SEQ ID NO: 2746 - DNA, 20 bp, Artificial Sequence
  source: /note="Description of Artificial Sequence: Synthetic oligonucleotide"
ctgcaggctcttgcgccgta

SEQ ID NO: 2747 - DNA, 20 bp, Artificial Sequence
  source: /note="Description of Artificial Sequence: Synthetic oligonucleotide"
actgcaggctcttgcgccgt

SEQ ID NO: 2748 - DNA, 20 bp, Artificial Sequence
  source: /note="Description of Artificial Sequence: Synthetic oligonucleotide"
cactgcaggctcttgcgccg

SEQ ID NO: 2749 - DNA, 20 bp, Artificial Sequence
  source: /note="Description of Artificial Sequence: Synthetic oligonucleotide"
ccactgcaggctcttgcgcc

SEQ ID NO: 2750 - DNA, 20 bp, Artificial Sequence
  source: /note="Description of Artificial Sequence: Synthetic oligonucleotide"
cccactgcaggctcttgcgc

SEQ ID NO: 2751 - DNA, 20 bp, Artificial Sequence
  source: /note="Description of Artificial Sequence: Synthetic oligonucleotide"
gcccactgcaggctcttgcg

SEQ ID NO: 2752 - DNA, 20 bp, Artificial Sequence
  source: /note="Description of Artificial Sequence: Synthetic oligonucleotide"
ggcccactgcaggctcttgc

SEQ ID NO: 2753 - DNA, 20 bp, Artificial Sequence
  source: /note="Description of Artificial Sequence: Synthetic oligonucleotide"
ttgcggctcagcctccgggc

SEQ ID NO: 2754 - DNA, 20 bp, Artificial Sequence
  source: /note="Description of Artificial Sequence: Synthetic oligonucleotide"
cttgcggctcagcctccggg

SEQ ID NO: 2755 - DNA, 20 bp, Artificial Sequence
  source: /note="Description of Artificial Sequence: Synthetic oligonucleotide"
ccttgcggctcagcctccgg

SEQ ID NO: 2756 - DNA, 20 bp, Artificial Sequence
  source: /note="Description of Artificial Sequence: Synthetic oligonucleotide"
gccttgcggctcagcctccg

SEQ ID NO: 2757 - DNA, 20 bp, Artificial Sequence
  source: /note="Description of Artificial Sequence: Synthetic oligonucleotide"
cgccttgcggctcagcctcc

SEQ ID NO: 2758 - DNA, 20 bp, Artificial Sequence
  source: /note="Description of Artificial Sequence: Synthetic oligonucleotide"
gcgccttgcggctcagcctc

SEQ ID NO: 2759 - DNA, 20 bp, Artificial Sequence
  source: /note="Description of Artificial Sequence: Synthetic oligonucleotide"
gctggctgatccactccgcg

SEQ ID NO: 2760 - DNA, 20 bp, Artificial Sequence
  source: /note="Description of Artificial Sequence: Synthetic oligonucleotide"
tgctggctgatccactccgc

SEQ ID NO: 2761 - DNA, 20 bp, Artificial Sequence
  source: /note="Description of Artificial Sequence: Synthetic oligonucleotide"
ctgctggctgatccactccg

SEQ ID NO: 2762 - DNA, 20 bp, Artificial Sequence
  source: /note="Description of Artificial Sequence: Synthetic oligonucleotide"
gctgctggctgatccactcc

SEQ ID NO: 2763 - DNA, 20 bp, Artificial Sequence
  source: /note="Description of Artificial Sequence: Synthetic oligonucleotide"
cgctgctggctgatccactc

SEQ ID NO: 2764 - DNA, 20 bp, Artificial Sequence
  source: /note="Description of Artificial Sequence: Synthetic oligonucleotide"
gcgctgctggctgatccact

SEQ ID NO: 2765 - DNA, 20 bp, Artificial Sequence
  source: /note="Description of Artificial Sequence: Synthetic oligonucleotide"
ggcgctgctggctgatccac

SEQ ID NO: 2766 - DNA, 20 bp, Artificial Sequence
  source: /note="Description of Artificial Sequence: Synthetic oligonucleotide"
aggcgctgctggctgatcca

SEQ ID NO: 2767 - DNA, 20 bp, Artificial Sequence
  source: /note="Description of Artificial Sequence: Synthetic oligonucleotide"
gaggcgctgctggctgatcc

SEQ ID NO: 2768 - DNA, 20 bp, Artificial Sequence
  source: /note="Description of Artificial Sequence: Synthetic oligonucleotide"
tgaggcgctgctggctgatc

SEQ ID NO: 2769 - DNA, 20 bp, Artificial Sequence
  source: /note="Description of Artificial Sequence: Synthetic oligonucleotide"
ctgaggcgctgctggctgat

SEQ ID NO: 2770 - DNA, 20 bp, Artificial Sequence
  source: /note="Description of Artificial Sequence: Synthetic oligonucleotide"
gctgaggcgctgctggctga

SEQ ID NO: 2771 - DNA, 20 bp, Artificial Sequence
  source: /note="Description of Artificial Sequence: Synthetic oligonucleotide"
ggctgaggcgctgctggctg

SEQ ID NO: 2772 - DNA, 20 bp, Artificial Sequence
  source: /note="Description of Artificial Sequence: Synthetic oligonucleotide"
aggctgaggcgctgctggct

SEQ ID NO: 2773 - DNA, 20 bp, Artificial Sequence
  source: /note="Description of Artificial Sequence: Synthetic oligonucleotide"
caggctgaggcgctgctggc

SEQ ID NO: 2774 - DNA, 20 bp, Artificial Sequence
  source: /note="Description of Artificial Sequence: Synthetic oligonucleotide"
acaggctgaggcgctgctgg

SEQ ID NO: 2775 - DNA, 20 bp, Artificial Sequence
  source: /note="Description of Artificial Sequence: Synthetic oligonucleotide"
tacaggctgaggcgctgctg

SEQ ID NO: 2776 - DNA, 20 bp, Artificial Sequence
  source: /note="Description of Artificial Sequence: Synthetic oligonucleotide"
gtacaggctgaggcgctgct

SEQ ID NO: 2777 - DNA, 20 bp, Artificial Sequence
  source: /note="Description of Artificial Sequence: Synthetic oligonucleotide"
ggtacaggctgaggcgctgc

SEQ ID NO: 2778 - DNA, 20 bp, Artificial Sequence
  source: /note="Description of Artificial Sequence: Synthetic oligonucleotide"
cggtacaggctgaggcgctg

SEQ ID NO: 2779 - DNA, 20 bp, Artificial Sequence
  source: /note="Description of Artificial Sequence: Synthetic oligonucleotide"
ccggtacaggctgaggcgct

SEQ ID NO: 2780 - DNA, 20 bp, Artificial Sequence
  source: /note="Description of Artificial Sequence: Synthetic oligonucleotide"
gccggtacaggctgaggcgc

SEQ ID NO: 2781 - DNA, 20 bp, Artificial Sequence
  source: /note="Description of Artificial Sequence: Synthetic oligonucleotide"
cgccggtacaggctgaggcg

SEQ ID NO: 2782 - DNA, 20 bp, Artificial Sequence
  source: /note="Description of Artificial Sequence: Synthetic oligonucleotide"
gcgccggtacaggctgaggc

SEQ ID NO: 2783 - DNA, 20 bp, Artificial Sequence
  source: /note="Description of Artificial Sequence: Synthetic oligonucleotide"
agcgccggtacaggctgagg

SEQ ID NO: 2784 - DNA, 20 bp, Artificial Sequence
  source: /note="Description of Artificial Sequence: Synthetic oligonucleotide"
gagcgccggtacaggctgag

SEQ ID NO: 2785 - DNA, 20 bp, Artificial Sequence
  source: /note="Description of Artificial Sequence: Synthetic oligonucleotide"
agagcgccggtacaggctga

SEQ ID NO: 2786 - DNA, 20 bp, Artificial Sequence
  source: /note="Description of Artificial Sequence: Synthetic oligonucleotide"
cagagcgccggtacaggctg

SEQ ID NO: 2787 - DNA, 20 bp, Artificial Sequence
  source: /note="Description of Artificial Sequence: Synthetic oligonucleotide"
tcagagcgccggtacaggct

SEQ ID NO: 2788 - DNA, 20 bp, Artificial Sequence
  source: /note="Description of Artificial Sequence: Synthetic oligonucleotide"
ctcagagcgccggtacaggc

SEQ ID NO: 2789 - DNA, 20 bp, Artificial Sequence
  source: /note="Description of Artificial Sequence: Synthetic oligonucleotide"
gctcagagcgccggtacagg

SEQ ID NO: 2790 - DNA, 20 bp, Artificial Sequence
  source: /note="Description of Artificial Sequence: Synthetic oligonucleotide"
cgctcagagcgccggtacag

SEQ ID NO: 2791 - DNA, 20 bp, Artificial Sequence
  source: /note="Description of Artificial Sequence: Synthetic oligonucleotide"
gcgctcagagcgccggtaca

SEQ ID NO: 2792 - DNA, 20 bp, Artificial Sequence
  source: /note="Description of Artificial Sequence: Synthetic oligonucleotide"
gctcctggcgctcagagcgc

SEQ ID NO: 2793 - DNA, 20 bp, Artificial Sequence
  source: /note="Description of Artificial Sequence: Synthetic oligonucleotide"
agctcctggcgctcagagcg

SEQ ID NO: 2794 - DNA, 20 bp, Artificial Sequence
  source: /note="Description of Artificial Sequence: Synthetic oligonucleotide"
gagctcctggcgctcagagc

SEQ ID NO: 2795 - DNA, 20 bp, Artificial Sequence
  source: /note="Description of Artificial Sequence: Synthetic oligonucleotide"
agagctcctggcgctcagag

SEQ ID NO: 2796 - DNA, 20 bp, Artificial Sequence
  source: /note="Description of Artificial Sequence: Synthetic oligonucleotide"
gagagctcctggcgctcaga

SEQ ID NO: 2797 - DNA, 20 bp, Artificial Sequence
  source: /note="Description of Artificial Sequence: Synthetic oligonucleotide"
ggagagctcctggcgctcag

SEQ ID NO: 2798 - DNA, 20 bp, Artificial Sequence
  source: /note="Description of Artificial Sequence: Synthetic oligonucleotide"
cggagagctcctggcgctca

SEQ ID NO: 2799 - DNA, 20 bp, Artificial Sequence
  source: /note="Description of Artificial Sequence: Synthetic oligonucleotide"
tcggagagctcctggcgctc

SEQ ID NO: 2800 - DNA, 20 bp, Artificial Sequence
  source: /note="Description of Artificial Sequence: Synthetic oligonucleotide"
ctcggagagctcctggcgct

SEQ ID NO: 2801 - DNA, 20 bp, Artificial Sequence
  source: /note="Description of Artificial Sequence: Synthetic oligonucleotide"
gctcggagagctcctggcgc

SEQ ID NO: 2802 - DNA, 20 bp, Artificial Sequence
  source: /note="Description of Artificial Sequence: Synthetic oligonucleotide"
agctcggagagctcctggcg

SEQ ID NO: 2803 - DNA, 20 bp, Artificial Sequence
  source: /note="Description of Artificial Sequence: Synthetic oligonucleotide"
cagctcggagagctcctggc

SEQ ID NO: 2804 - DNA, 20 bp, Artificial Sequence
  source: /note="Description of Artificial Sequence: Synthetic oligonucleotide"
ccagctcggagagctcctgg

SEQ ID NO: 2805 - DNA, 20 bp, Artificial Sequence
  source: /note="Description of Artificial Sequence: Synthetic oligonucleotide"
accagctcggagagctcctg

SEQ ID NO: 2806 - DNA, 20 bp, Artificial Sequence
  source: /note="Description of Artificial Sequence: Synthetic oligonucleotide"
caccagctcggagagctcct

SEQ ID NO: 2807 - DNA, 20 bp, Artificial Sequence
  source: /note="Description of Artificial Sequence: Synthetic oligonucleotide"
tcaccagctcggagagctcc

SEQ ID NO: 2808 - DNA, 20 bp, Artificial Sequence
  source: /note="Description of Artificial Sequence: Synthetic oligonucleotide"
ttcaccagctcggagagctc

SEQ ID NO: 2809 - DNA, 20 bp, Artificial Sequence
  source: /note="Description of Artificial Sequence: Synthetic oligonucleotide"
cttcaccagctcggagagct

SEQ ID NO: 2810 - DNA, 20 bp, Artificial Sequence
  source: /note="Description of Artificial Sequence: Synthetic oligonucleotide"
tcttcaccagctcggagagc

SEQ ID NO: 2811 - DNA, 20 bp, Artificial Sequence
  source: /note="Description of Artificial Sequence: Synthetic oligonucleotide"
ttcttcaccagctcggagag

SEQ ID NO: 2812 - DNA, 20 bp, Artificial Sequence
  source: /note="Description of Artificial Sequence: Synthetic oligonucleotide"
ggttcttcaccagctcggag

SEQ ID NO: 2813 - DNA, 20 bp, Artificial Sequence
  source: /note="Description of Artificial Sequence: Synthetic oligonucleotide"
cggttcttcaccagctcgga

SEQ ID NO: 2814 - DNA, 20 bp, Artificial Sequence
  source: /note="Description of Artificial Sequence: Synthetic oligonucleotide"
gcggttcttcaccagctcgg

SEQ ID NO: 2815 - DNA, 20 bp, Artificial Sequence
  source: /note="Description of Artificial Sequence: Synthetic oligonucleotide"
tgcggttcttcaccagctcg

SEQ ID NO: 2816 - DNA, 20 bp, Artificial Sequence
  source: /note="Description of Artificial Sequence: Synthetic oligonucleotide"
atgcggttcttcaccagctc

SEQ ID NO: 2817 - DNA, 20 bp, Artificial Sequence
  source: /note="Description of Artificial Sequence: Synthetic oligonucleotide"
catgcggttcttcaccagct

SEQ ID NO: 2818 - DNA, 20 bp, Artificial Sequence
  source: /note="Description of Artificial Sequence: Synthetic oligonucleotide"
tcatgcggttcttcaccagc

SEQ ID NO: 2819 - DNA, 20 bp, Artificial Sequence
  source: /note="Description of Artificial Sequence: Synthetic oligonucleotide"
ttcatgcggttcttcaccag

SEQ ID NO: 2820 - DNA, 20 bp, Artificial Sequence
  source: /note="Description of Artificial Sequence: Synthetic oligonucleotide"
cttcatgcggttcttcacca

SEQ ID NO: 2821 - DNA, 20 bp, Artificial Sequence
  source: /note="Description of Artificial Sequence: Synthetic oligonucleotide"
gcttcatgcggttcttcacc

SEQ ID NO: 2822 - DNA, 20 bp, Artificial Sequence
  source: /note="Description of Artificial Sequence: Synthetic oligonucleotide"
tgcttcatgcggttcttcac

SEQ ID NO: 2823 - DNA, 20 bp, Artificial Sequence
  source: /note="Description of Artificial Sequence: Synthetic oligonucleotide"
gtgcttcatgcggttcttca

SEQ ID NO: 2824 - DNA, 20 bp, Artificial Sequence
  source: /note="Description of Artificial Sequence: Synthetic oligonucleotide"
ggtgcttcatgcggttcttc

SEQ ID NO: 2825 - DNA, 20 bp, Artificial Sequence
  source: /note="Description of Artificial Sequence: Synthetic oligonucleotide"
aggtgcttcatgcggttctt

SEQ ID NO: 2826 - DNA, 20 bp, Artificial Sequence
  source: /note="Description of Artificial Sequence: Synthetic oligonucleotide"
caggtgcttcatgcggttct

SEQ ID NO: 2827 - DNA, 20 bp, Artificial Sequence
  source: /note="Description of Artificial Sequence: Synthetic oligonucleotide"
ccaggtgcttcatgcggttc

SEQ ID NO: 2828 - DNA, 20 bp, Artificial Sequence
  source: /note="Description of Artificial Sequence: Synthetic oligonucleotide"
cccaggtgcttcatgcggtt

SEQ ID NO: 2829 - DNA, 20 bp, Artificial Sequence
  source: /note="Description of Artificial Sequence: Synthetic oligonucleotide"
ccccaggtgcttcatgcggt

SEQ ID NO: 2830 - DNA, 20 bp, Artificial Sequence
  source: /note="Description of Artificial Sequence: Synthetic oligonucleotide"
gccccaggtgcttcatgcgg

SEQ ID NO: 2831 - DNA, 20 bp, Artificial Sequence
  source: /note="Description of Artificial Sequence: Synthetic oligonucleotide"
agccccaggtgcttcatgcg

SEQ ID NO: 2832 - DNA, 20 bp, Artificial Sequence
  source: /note="Description of Artificial Sequence: Synthetic oligonucleotide"
cagccccaggtgcttcatgc

SEQ ID NO: 2833 - DNA, 20 bp, Artificial Sequence
  source: /note="Description of Artificial Sequence: Synthetic oligonucleotide"
gcagccccaggtgcttcatg

SEQ ID NO: 2834 - DNA, 20 bp, Artificial Sequence
  source: /note="Description of Artificial Sequence: Synthetic oligonucleotide"
ggcagccccaggtgcttcat

SEQ ID NO: 2835 - DNA, 20 bp, Artificial Sequence
  source: /note="Description of Artificial Sequence: Synthetic oligonucleotide"
gggcagccccaggtgcttca

SEQ ID NO: 2836 - DNA, 20 bp, Artificial Sequence
  source: /note="Description of Artificial Sequence: Synthetic oligonucleotide"
tgggcagccccaggtgcttc

SEQ ID NO: 2837 - DNA, 20 bp, Artificial Sequence
  source: /note="Description of Artificial Sequence: Synthetic oligonucleotide"
gtgggcagccccaggtgctt

SEQ ID NO: 2838 - DNA, 20 bp, Artificial Sequence
  source: /note="Description of Artificial Sequence: Synthetic oligonucleotide"
ggtgggcagccccaggtgct

SEQ ID NO: 2839 - DNA, 20 bp, Artificial Sequence
  source: /note="Description of Artificial Sequence: Synthetic oligonucleotide"
tggtgggcagccccaggtgc

SEQ ID NO: 2840 - DNA, 20 bp, Artificial Sequence
  source: /note="Description of Artificial Sequence: Synthetic oligonucleotide"
gtggtgggcagccccaggtg

SEQ ID NO: 2841 - DNA, 20 bp, Artificial Sequence
  source: /note="Description of Artificial Sequence: Synthetic oligonucleotide"
ggtggtgggcagccccaggt

SEQ ID NO: 2842 - DNA, 20 bp, Artificial Sequence
  source: /note="Description of Artificial Sequence: Synthetic oligonucleotide"
tagccggtggtgggcagccc

SEQ ID NO: 2843 - DNA, 20 bp, Artificial Sequence
  source: /note="Description of Artificial Sequence: Synthetic oligonucleotide"
gtagccggtggtgggcagcc

SEQ ID NO: 2844 - DNA, 20 bp, Artificial Sequence
  source: /note="Description of Artificial Sequence: Synthetic oligonucleotide"
cgtagccggtggtgggcagc

SEQ ID NO: 2845 - DNA, 20 bp, Artificial Sequence
  source: /note="Description of Artificial Sequence: Synthetic oligonucleotide"
tcgtagccggtggtgggcag

SEQ ID NO: 2846 - DNA, 20 bp, Artificial Sequence
  source: /note="Description of Artificial Sequence: Synthetic oligonucleotide"
gtcgtagccggtggtgggca

SEQ ID NO: 2847 - DNA, 20 bp, Artificial Sequence
  source: /note="Description of Artificial Sequence: Synthetic oligonucleotide"
cgtcgtagccggtggtgggc

SEQ ID NO: 2848 - DNA, 20 bp, Artificial Sequence
  source: /note="Description of Artificial Sequence: Synthetic oligonucleotide"
tcgtcgtagccggtggtggg

SEQ ID NO: 2849 - DNA, 20 bp, Artificial Sequence
  source: /note="Description of Artificial Sequence: Synthetic oligonucleotide"
ctcgtcgtagccggtggtgg

SEQ ID NO: 2850 - DNA, 20 bp, Artificial Sequence
  source: /note="Description of Artificial Sequence: Synthetic oligonucleotide"
tctcgtcgtagccggtggtg

SEQ ID NO: 2851 - DNA, 20 bp, Artificial Sequence
  source: /note="Description of Artificial Sequence: Synthetic oligonucleotide"
atctcgtcgtagccggtggt

SEQ ID NO: 2852 - DNA, 20 bp, Artificial Sequence
  source: /note="Description of Artificial Sequence: Synthetic oligonucleotide"
catctcgtcgtagccggtgg

SEQ ID NO: 2853 - DNA, 20 bp, Artificial Sequence
  source: /note="Description of Artificial Sequence: Synthetic oligonucleotide"
tcatctcgtcgtagccggtg

SEQ ID NO: 2854 - DNA, 20 bp, Artificial Sequence
  source: /note="Description of Artificial Sequence: Synthetic oligonucleotide"
ttcatctcgtcgtagccggt

SEQ ID NO: 2855 - DNA, 20 bp, Artificial Sequence
  source: /note="Description of Artificial Sequence: Synthetic oligonucleotide"
gttcatctcgtcgtagccgg

SEQ ID NO: 2856 - DNA, 20 bp, Artificial Sequence
  source: /note="Description of Artificial Sequence: Synthetic oligonucleotide"
cgttcatctcgtcgtagccg

SEQ ID NO: 2857 - DNA, 20 bp, Artificial Sequence
  source: /note="Description of Artificial Sequence: Synthetic oligonucleotide"
tcgttcatctcgtcgtagcc

SEQ ID NO: 2858 - DNA, 20 bp, Artificial Sequence
  source: /note="Description of Artificial Sequence: Synthetic oligonucleotide"
gtcgttcatctcgtcgtagc

SEQ ID NO: 2859 - DNA, 20 bp, Artificial Sequence
  source: /note="Description of Artificial Sequence: Synthetic oligonucleotide"
ggtcgttcatctcgtcgtag

SEQ ID NO: 2860 - DNA, 20 bp, Artificial Sequence
  source: /note="Description of Artificial Sequence: Synthetic oligonucleotide"
tggtcgttcatctcgtcgta

SEQ ID NO: 2861 - DNA, 20 bp, Artificial Sequence
  source: /note="Description of Artificial Sequence: Synthetic oligonucleotide"
gtggtcgttcatctcgtcgt

SEQ ID NO: 2862 - DNA, 20 bp, Artificial Sequence
  source: /note="Description of Artificial Sequence: Synthetic oligonucleotide"
ggtggtcgttcatctcgtcg

SEQ ID NO: 2863 - DNA, 20 bp, Artificial Sequence
  source: /note="Description of Artificial Sequence: Synthetic oligonucleotide"
tggtggtcgttcatctcgtc

SEQ ID NO: 2864 - DNA, 20 bp, Artificial Sequence
  source: /note="Description of Artificial Sequence: Synthetic oligonucleotide"
ctggtggtcgttcatctcgt

SEQ ID NO: 2865 - DNA, 20 bp, Artificial Sequence
  source: /note="Description of Artificial Sequence: Synthetic oligonucleotide"
tctggtggtcgttcatctcg

SEQ ID NO: 2866 - DNA, 20 bp, Artificial Sequence
  source: /note="Description of Artificial Sequence: Synthetic oligonucleotide"
ttctggtggtcgttcatctc

SEQ ID NO: 2867 - DNA, 20 bp, Artificial Sequence
  source: /note="Description of Artificial Sequence: Synthetic oligonucleotide"
gttctggtggtcgttcatct

SEQ ID NO: 2868 - DNA, 20 bp, Artificial Sequence
  source: /note="Description of Artificial Sequence: Synthetic oligonucleotide"
tgttctggtggtcgttcatc

SEQ ID NO: 2869 - DNA, 20 bp, Artificial Sequence
  source: /note="Description of Artificial Sequence: Synthetic oligonucleotide"
gtgttctggtggtcgttcat

SEQ ID NO: 2870 - DNA, 20 bp, Artificial Sequence
  source: /note="Description of Artificial Sequence: Synthetic oligonucleotide"
ggtgttctggtggtcgttca

SEQ ID NO: 2871 - DNA, 20 bp, Artificial Sequence
  source: /note="Description of Artificial Sequence: Synthetic oligonucleotide"
gggtgttctggtggtcgttc

SEQ ID NO: 2872 - DNA, 20 bp, Artificial Sequence
  source: /note="Description of Artificial Sequence: Synthetic oligonucleotide"
agggtgttctggtggtcgtt

SEQ ID NO: 2873 - DNA, 20 bp, Artificial Sequence
  source: /note="Description of Artificial Sequence: Synthetic oligonucleotide"
gagggtgttctggtggtcgt

SEQ ID NO: 2874 - DNA, 20 bp, Artificial Sequence
  source: /note="Description of Artificial Sequence: Synthetic oligonucleotide"
agagggtgttctggtggtcg

SEQ ID NO: 2875 - DNA, 20 bp, Artificial Sequence
  source: /note="Description of Artificial Sequence: Synthetic oligonucleotide"
gagagggtgttctggtggtc

SEQ ID NO: 2876 - DNA, 20 bp, Artificial Sequence
  source: /note="Description of Artificial Sequence: Synthetic oligonucleotide"
ggagagggtgttctggtggt

SEQ ID NO: 2877 - DNA, 20 bp, Artificial Sequence
  source: /note="Description of Artificial Sequence: Synthetic oligonucleotide"
aggagagggtgttctggtgg

SEQ ID NO: 2878 - DNA, 20 bp, Artificial Sequence
  source: /note="Description of Artificial Sequence: Synthetic oligonucleotide"
taggagagggtgttctggtg

SEQ ID NO: 2879 - DNA, 20 bp, Artificial Sequence
  source: /note="Description of Artificial Sequence: Synthetic oligonucleotide"
gtaggagagggtgttctggt

SEQ ID NO: 2880 - DNA, 20 bp, Artificial Sequence
  source: /note="Description of Artificial Sequence: Synthetic oligonucleotide"
cgtaggagagggtgttctgg

SEQ ID NO: 2881 - DNA, 20 bp, Artificial Sequence
  source: /note="Description of Artificial Sequence: Synthetic oligonucleotide"
acgtaggagagggtgttctg

SEQ ID NO: 2882 - DNA, 20 bp, Artificial Sequence
  source: /note="Description of Artificial Sequence: Synthetic oligonucleotide"
ggacgtaggagagggtgttc

SEQ ID NO: 2883 - DNA, 20 bp, Artificial Sequence
  source: /note="Description of Artificial Sequence: Synthetic oligonucleotide"
aggacgtaggagagggtgtt

SEQ ID NO: 2884 - DNA, 20 bp, Artificial Sequence
  source: /note="Description of Artificial Sequence: Synthetic oligonucleotide"
gaggacgtaggagagggtgt

SEQ ID NO: 2885 - DNA, 20 bp, Artificial Sequence
  source: /note="Description of Artificial Sequence: Synthetic oligonucleotide"
tgaggacgtaggagagggtg

SEQ ID NO: 2886 - DNA, 20 bp, Artificial Sequence
  source: /note="Description of Artificial Sequence: Synthetic oligonucleotide"
atgaggacgtaggagagggt

SEQ ID NO: 2887 - DNA, 20 bp, Artificial Sequence
  source: /note="Description of Artificial Sequence: Synthetic oligonucleotide"
gatgaggacgtaggagaggg

SEQ ID NO: 2888 - DNA, 20 bp, Artificial Sequence
  source: /note="Description of Artificial Sequence: Synthetic oligonucleotide"
tgatgaggacgtaggagagg

SEQ ID NO: 2889 - DNA, 20 bp, Artificial Sequence
  source: /note="Description of Artificial Sequence: Synthetic oligonucleotide"
ttgatgaggacgtaggagag

SEQ ID NO: 2890 - DNA, 20 bp, Artificial Sequence
  source: /note="Description of Artificial Sequence: Synthetic oligonucleotide"
gttgatgaggacgtaggaga

SEQ ID NO: 2891 - DNA, 20 bp, Artificial Sequence
  source: /note="Description of Artificial Sequence: Synthetic oligonucleotide"
ggttgatgaggacgtaggag

SEQ ID NO: 2892 - DNA, 20 bp, Artificial Sequence
  source: /note="Description of Artificial Sequence: Synthetic oligonucleotide"
gggttgatgaggacgtagga

SEQ ID NO: 2893 - DNA, 20 bp, Artificial Sequence
  source: /note="Description of Artificial Sequence: Synthetic oligonucleotide"
agggttgatgaggacgtagg

SEQ ID NO: 2894 - DNA, 20 bp, Artificial Sequence
  source: /note="Description of Artificial Sequence: Synthetic oligonucleotide"
gagggttgatgaggacgtag

SEQ ID NO: 2895 - DNA, 20 bp, Artificial Sequence
  source: /note="Description of Artificial Sequence: Synthetic oligonucleotide"
ggagggttgatgaggacgta

SEQ ID NO: 2896 - DNA, 20 bp, Artificial Sequence
  source: /note="Description of Artificial Sequence: Synthetic oligonucleotide"
cggagggttgatgaggacgt

SEQ ID NO: 2897 - DNA, 20 bp, Artificial Sequence
  source: /note="Description of Artificial Sequence: Synthetic oligonucleotide"
gcggagggttgatgaggacg

SEQ ID NO: 2898 - DNA, 20 bp, Artificial Sequence
  source: /note="Description of Artificial Sequence: Synthetic oligonucleotide"
ggcggagggttgatgaggac

SEQ ID NO: 2899 - DNA, 20 bp, Artificial Sequence
  source: /note="Description of Artificial Sequence: Synthetic oligonucleotide"
gggcggagggttgatgagga

SEQ ID NO: 2900 - DNA, 20 bp, Artificial Sequence
  source: /note="Description of Artificial Sequence: Synthetic oligonucleotide"
cgggcggagggttgatgagg

SEQ ID NO: 2901 - DNA, 20 bp, Artificial Sequence
  source: /note="Description of Artificial Sequence: Synthetic oligonucleotide"
tcgggcggagggttgatgag

SEQ ID NO: 2902 - DNA, 20 bp, Artificial Sequence
  source: /note="Description of Artificial Sequence: Synthetic oligonucleotide"
gtcgggcggagggttgatga

SEQ ID NO: 2903 - DNA, 20 bp, Artificial Sequence
  source: /note="Description of Artificial Sequence: Synthetic oligonucleotide"
tgtcgggcggagggttgatg

SEQ ID NO: 2904 - DNA, 20 bp, Artificial Sequence
  source: /note="Description of Artificial Sequence: Synthetic oligonucleotide"
gtgtcgggcggagggttgat

SEQ ID NO: 2905 - DNA, 20 bp, Artificial Sequence
  source: /note="Description of Artificial Sequence: Synthetic oligonucleotide"
cgtgtcgggcggagggttga

SEQ ID NO: 2906 - DNA, 20 bp, Artificial Sequence
  source: /note="Description of Artificial Sequence: Synthetic oligonucleotide"
tcgtgtcgggcggagggttg

SEQ ID NO: 2907 - DNA, 20 bp, Artificial Sequence
  source: /note="Description of Artificial Sequence: Synthetic oligonucleotide"
ctcgtgtcgggcggagggtt

SEQ ID NO: 2908 - DNA, 20 bp, Artificial Sequence
  source: /note="Description of Artificial Sequence: Synthetic oligonucleotide"
cctcgtgtcgggcggagggt

SEQ ID NO: 2909 - DNA, 20 bp, Artificial Sequence
  source: /note="Description of Artificial Sequence: Synthetic oligonucleotide"
agcctcgtgtcgggcggagg

SEQ ID NO: 2910 - DNA, 20 bp, Artificial Sequence
  source: /note="Description of Artificial Sequence: Synthetic oligonucleotide"
cagcctcgtgtcgggcggag

SEQ ID NO: 2911 - DNA, 20 bp, Artificial Sequence
  source: /note="Description of Artificial Sequence: Synthetic oligonucleotide"
ccagcctcgtgtcgggcgga

SEQ ID NO: 2912 - DNA, 20 bp, Artificial Sequence
  source: /note="Description of Artificial Sequence: Synthetic oligonucleotide"
tccagcctcgtgtcgggcgg

SEQ ID NO: 2913 - DNA, 20 bp, Artificial Sequence
  source: /note="Description of Artificial Sequence: Synthetic oligonucleotide"
ctccagcctcgtgtcgggcg

SEQ ID NO: 2914 - DNA, 20 bp, Artificial Sequence
  source: /note="Description of Artificial Sequence: Synthetic oligonucleotide"
gctccagcctcgtgtcgggc

SEQ ID NO: 2915 - DNA, 20 bp, Artificial Sequence
  source: /note="Description of Artificial Sequence: Synthetic oligonucleotide"
ggctccagcctcgtgtcggg

SEQ ID NO: 2916 - DNA, 20 bp, Artificial Sequence
  source: /note="Description of Artificial Sequence: Synthetic oligonucleotide"
gggctccagcctcgtgtcgg

SEQ ID NO: 2917 - DNA, 20 bp, Artificial Sequence
  source: /note="Description of Artificial Sequence: Synthetic oligonucleotide"
tgggctccagcctcgtgtcg

SEQ ID NO: 2918 - DNA, 20 bp, Artificial Sequence
  source: /note="Description of Artificial Sequence: Synthetic oligonucleotide"
ctgggctccagcctcgtgtc

SEQ ID NO: 2919 - DNA, 20 bp, Artificial Sequence
  source: /note="Description of Artificial Sequence: Synthetic oligonucleotide"
actgggctccagcctcgtgt

SEQ ID NO: 2920 - DNA, 20 bp, Artificial Sequence
  source: /note="Description of Artificial Sequence: Synthetic oligonucleotide"
cactgggctccagcctcgtg

SEQ ID NO: 2921 - DNA, 20 bp, Artificial Sequence
  source: /note="Description of Artificial Sequence: Synthetic oligonucleotide"
tcactgggctccagcctcgt

SEQ ID NO: 2922 - DNA, 20 bp, Artificial Sequence
  source: /note="Description of Artificial Sequence: Synthetic oligonucleotide"
gtcactgggctccagcctcg

SEQ ID NO: 2923 - DNA, 20 bp, Artificial Sequence
  source: /note="Description of Artificial Sequence: Synthetic oligonucleotide"
tgtcactgggctccagcctc

SEQ ID NO: 2924 - DNA, 20 bp, Artificial Sequence
  source: /note="Description of Artificial Sequence: Synthetic oligonucleotide"
atgtcactgggctccagcct

SEQ ID NO: 2925 - DNA, 20 bp, Artificial Sequence
  source: /note="Description of Artificial Sequence: Synthetic oligonucleotide"
aatgtcactgggctccagcc

SEQ ID NO: 2926 - DNA, 20 bp, Artificial Sequence
  source: /note="Description of Artificial Sequence: Synthetic oligonucleotide"
caatgtcactgggctccagc

SEQ ID NO: 2927 - DNA, 20 bp, Artificial Sequence
  source: /note="Description of Artificial Sequence: Synthetic oligonucleotide"
acaatgtcactgggctccag

SEQ ID NO: 2928 - DNA, 20 bp, Artificial Sequence
  source: /note="Description of Artificial Sequence: Synthetic oligonucleotide"
gacaatgtcactgggctcca

SEQ ID NO: 2929 - DNA, 20 bp, Artificial Sequence
  source: /note="Description of Artificial Sequence: Synthetic oligonucleotide"
agacaatgtcactgggctcc

SEQ ID NO: 2930 - DNA, 20 bp, Artificial Sequence
  source: /note="Description of Artificial Sequence: Synthetic oligonucleotide"
tagacaatgtcactgggctc

SEQ ID NO: 2931 - DNA, 20 bp, Artificial Sequence
  source: /note="Description of Artificial Sequence: Synthetic oligonucleotide"
atagacaatgtcactgggct

SEQ ID NO: 2932 - DNA, 20 bp, Artificial Sequence
  source: /note="Description of Artificial Sequence: Synthetic oligonucleotide"
gatagacaatgtcactgggc

SEQ ID NO: 2933 - DNA, 20 bp, Artificial Sequence
  source: /note="Description of Artificial Sequence: Synthetic oligonucleotide"
agatagacaatgtcactggg

SEQ ID NO: 2934 - DNA, 20 bp, Artificial Sequence
  source: /note="Description of Artificial Sequence: Synthetic oligonucleotide"
gagatagacaatgtcactgg

SEQ ID NO: 2935 - DNA, 20 bp, Artificial Sequence
  source: /note="Description of Artificial Sequence: Synthetic oligonucleotide"
tgagatagacaatgtcactg

SEQ ID NO: 2936 - DNA, 20 bp, Artificial Sequence
  source: /note="Description of Artificial Sequence: Synthetic oligonucleotide"
atgagatagacaatgtcact

SEQ ID NO: 2937 - DNA, 20 bp, Artificial Sequence
  source: /note="Description of Artificial Sequence: Synthetic oligonucleotide"
gatgagatagacaatgtcac

SEQ ID NO: 2938 - DNA, 20 bp, Artificial Sequence
  source: /note="Description of Artificial Sequence: Synthetic oligonucleotide"
ggatgagatagacaatgtca

SEQ ID NO: 2939 - DNA, 20 bp, Artificial Sequence
  source: /note="Description of Artificial Sequence: Synthetic oligonucleotide"
gcggatgagatagacaatgt

SEQ ID NO: 2940 - DNA, 20 bp, Artificial Sequence
  source: /note="Description of Artificial Sequence: Synthetic oligonucleotide"
agcggatgagatagacaatg

SEQ ID NO: 2941 - DNA, 20 bp, Artificial Sequence
  source: /note="Description of Artificial Sequence: Synthetic oligonucleotide"
gagcggatgagatagacaat

SEQ ID NO: 2942 - DNA, 20 bp, Artificial Sequence
  source: /note="Description of Artificial Sequence: Synthetic oligonucleotide"
ggagcggatgagatagacaa

SEQ ID NO: 2943 - DNA, 20 bp, Artificial Sequence
  source: /note="Description of Artificial Sequence: Synthetic oligonucleotide"
cggagcggatgagatagaca

SEQ ID NO: 2944 - DNA, 20 bp, Artificial Sequence
  source: /note="Description of Artificial Sequence: Synthetic oligonucleotide"
tcggagcggatgagatagac

SEQ ID NO: 2945 - DNA, 20 bp, Artificial Sequence
  source: /note="Description of Artificial Sequence: Synthetic oligonucleotide"
gtcggagcggatgagataga

SEQ ID NO: 2946 - DNA, 20 bp, Artificial Sequence
  source: /note="Description of Artificial Sequence: Synthetic oligonucleotide"
ggtcggagcggatgagatag

SEQ ID NO: 2947 - DNA, 20 bp, Artificial Sequence
  source: /note="Description of Artificial Sequence: Synthetic oligonucleotide"
gggtcggagcggatgagata

SEQ ID NO: 2948 - DNA, 20 bp, Artificial Sequence
  source: /note="Description of Artificial Sequence: Synthetic oligonucleotide"
gctggccacgtgagccaggg

SEQ ID NO: 2949 - DNA, 20 bp, Artificial Sequence
  source: /note="Description of Artificial Sequence: Synthetic oligonucleotide"
tgctggccacgtgagccagg

SEQ ID NO: 2950 - DNA, 20 bp, Artificial Sequence
  source: /note="Description of Artificial Sequence: Synthetic oligonucleotide"
ctgctggccacgtgagccag

SEQ ID NO: 2951 - DNA, 20 bp, Artificial Sequence
  source: /note="Description of Artificial Sequence: Synthetic oligonucleotide"
gctgctggccacgtgagcca

SEQ ID NO: 2952 - DNA, 20 bp, Artificial Sequence
  source: /note="Description of Artificial Sequence: Synthetic oligonucleotide"
agctgctggccacgtgagcc

SEQ ID NO: 2953 - DNA, 20 bp, Artificial Sequence
  source: /note="Description of Artificial Sequence: Synthetic oligonucleotide"
gagctgctggccacgtgagc

SEQ ID NO: 2954 - DNA, 20 bp, Artificial Sequence
  source: /note="Description of Artificial Sequence: Synthetic oligonucleotide"
ggagctgctggccacgtgag

SEQ ID NO: 2955 - DNA, 20 bp, Artificial Sequence
  source: /note="Description of Artificial Sequence: Synthetic oligonucleotide"
gggagctgctggccacgtga

SEQ ID NO: 2956 - DNA, 20 bp, Artificial Sequence
  source: /note="Description of Artificial Sequence: Synthetic oligonucleotide"
tgggagctgctggccacgtg

SEQ ID NO: 2957 - DNA, 20 bp, Artificial Sequence
  source: /note="Description of Artificial Sequence: Synthetic oligonucleotide"
ctgggagctgctggccacgt

SEQ ID NO: 2958 - DNA, 20 bp, Artificial Sequence
  source: /note="Description of Artificial Sequence: Synthetic oligonucleotide"
tctgggagctgctggccacg

SEQ ID NO: 2959 - DNA, 20 bp, Artificial Sequence
  source: /note="Description of Artificial Sequence: Synthetic oligonucleotide"
ctctgggagctgctggccac

SEQ ID NO: 2960 - DNA, 20 bp, Artificial Sequence
  source: /note="Description of Artificial Sequence: Synthetic oligonucleotide"
gctctgggagctgctggcca

SEQ ID NO: 2961 - DNA, 20 bp, Artificial Sequence
  source: /note="Description of Artificial Sequence: Synthetic oligonucleotide"
ggctctgggagctgctggcc

SEQ ID NO: 2962 - DNA, 20 bp, Artificial Sequence
  source: /note="Description of Artificial Sequence: Synthetic oligonucleotide"
cggctctgggagctgctggc

SEQ ID NO: 2963 - DNA, 20 bp, Artificial Sequence
  source: /note="Description of Artificial Sequence: Synthetic oligonucleotide"
ccggctctgggagctgctgg

SEQ ID NO: 2964 - DNA, 20 bp, Artificial Sequence
  source: /note="Description of Artificial Sequence: Synthetic oligonucleotide"
tccggctctgggagctgctg

SEQ ID NO: 2965 - DNA, 20 bp, Artificial Sequence
  source: /note="Description of Artificial Sequence: Synthetic oligonucleotide"
ttccggctctgggagctgct

SEQ ID NO: 2966 - DNA, 20 bp, Artificial Sequence
  source: /note="Description of Artificial Sequence: Synthetic oligonucleotide"
cttccggctctgggagctgc

SEQ ID NO: 2967 - DNA, 20 bp, Artificial Sequence
  source: /note="Description of Artificial Sequence: Synthetic oligonucleotide"
tcttccggctctgggagctg

SEQ ID NO: 2968 - DNA, 20 bp, Artificial Sequence
  source: /note="Description of Artificial Sequence: Synthetic oligonucleotide"
ctcttccggctctgggagct

SEQ ID NO: 2969 - DNA, 20 bp, Artificial Sequence
  source: /note="Description of Artificial Sequence: Synthetic oligonucleotide"
gctcttccggctctgggagc

SEQ ID NO: 2970 - DNA, 20 bp, Artificial Sequence
  source: /note="Description of Artificial Sequence: Synthetic oligonucleotide"
tgctcttccggctctgggag

SEQ ID NO: 2971 - DNA, 20 bp, Artificial Sequence
  source: /note="Description of Artificial Sequence: Synthetic oligonucleotide"
ctgctcttccggctctggga

SEQ ID NO: 2972 - DNA, 20 bp, Artificial Sequence
  source: /note="Description of Artificial Sequence: Synthetic oligonucleotide"
gctgctcttccggctctggg

SEQ ID NO: 2973 - DNA, 20 bp, Artificial Sequence
  source: /note="Description of Artificial Sequence: Synthetic oligonucleotide"
agctgctcttccggctctgg

SEQ ID NO: 2974 - DNA, 20 bp, Artificial Sequence
  source: /note="Description of Artificial Sequence: Synthetic oligonucleotide"
cagctgctcttccggctctg

SEQ ID NO: 2975 - DNA, 20 bp, Artificial Sequence
  source: /note="Description of Artificial Sequence: Synthetic oligonucleotide"
acgacagcttgtggctgcag

SEQ ID NO: 2976 - DNA, 20 bp, Artificial Sequence
  source: /note="Description of Artificial Sequence: Synthetic oligonucleotide"
gacgacagcttgtggctgca

SEQ ID NO: 2977 - DNA, 20 bp, Artificial Sequence
  source: /note="Description of Artificial Sequence: Synthetic oligonucleotide"
ggacgacagcttgtggctgc

SEQ ID NO: 2978 - DNA, 20 bp, Artificial Sequence
  source: /note="Description of Artificial Sequence: Synthetic oligonucleotide"
aggacgacagcttgtggctg

SEQ ID NO: 2979 - DNA, 20 bp, Artificial Sequence
  source: /note="Description of Artificial Sequence: Synthetic oligonucleotide"
caggacgacagcttgtggct

SEQ ID NO: 2980 - DNA, 20 bp, Artificial Sequence
  source: /note="Description of Artificial Sequence: Synthetic oligonucleotide"
gcaggacgacagcttgtggc

SEQ ID NO: 2981 - DNA, 20 bp, Artificial Sequence
  source: /note="Description of Artificial Sequence: Synthetic oligonucleotide"
tgcaggacgacagcttgtgg

SEQ ID NO: 2982 - DNA, 20 bp, Artificial Sequence
  source: /note="Description of Artificial Sequence: Synthetic oligonucleotide"
ttgcaggacgacagcttgtg

SEQ ID NO: 2983 - DNA, 20 bp, Artificial Sequence
  source: /note="Description of Artificial Sequence: Synthetic oligonucleotide"
gttgcaggacgacagcttgt

SEQ ID NO: 2984 - DNA, 20 bp, Artificial Sequence
  source: /note="Description of Artificial Sequence: Synthetic oligonucleotide"
ggttgcaggacgacagcttg

SEQ ID NO: 2985 - DNA, 20 bp, Artificial Sequence
  source: /note="Description of Artificial Sequence: Synthetic oligonucleotide"
gggttgcaggacgacagctt

SEQ ID NO: 2986 - DNA, 20 bp, Artificial Sequence
  source: /note="Description of Artificial Sequence: Synthetic oligonucleotide"
gtctcgtcgcgagtctcggg

SEQ ID NO: 2987 - DNA, 20 bp, Artificial Sequence
  source: /note="Description of Artificial Sequence: Synthetic oligonucleotide"
tgtctcgtcgcgagtctcgg

SEQ ID NO: 2988 - DNA, 20 bp, Artificial Sequence
  source: /note="Description of Artificial Sequence: Synthetic oligonucleotide"
gtgtctcgtcgcgagtctcg

SEQ ID NO: 2989 - DNA, 20 bp, Artificial Sequence
  source: /note="Description of Artificial Sequence: Synthetic oligonucleotide"
tgtgtctcgtcgcgagtctc

SEQ ID NO: 2990 - DNA, 20 bp, Artificial Sequence
  source: /note="Description of Artificial Sequence: Synthetic oligonucleotide"
ctgtgtctcgtcgcgagtct

SEQ ID NO: 2991 - DNA, 20 bp, Artificial Sequence
  source: /note="Description of Artificial Sequence: Synthetic oligonucleotide"
gctgtgtctcgtcgcgagtc

SEQ ID NO: 2992 - DNA, 20 bp, Artificial Sequence
  source: /note="Description of Artificial Sequence: Synthetic oligonucleotide"
agctgtgtctcgtcgcgagt

SEQ ID NO: 2993 - DNA, 20 bp, Artificial Sequence
  source: /note="Description of Artificial Sequence: Synthetic oligonucleotide"
gagctgtgtctcgtcgcgag

SEQ ID NO: 2994 - DNA, 20 bp, Artificial Sequence
  source: /note="Description of Artificial Sequence: Synthetic oligonucleotide"
agagctgtgtctcgtcgcga

SEQ ID NO: 2995 - DNA, 20 bp, Artificial Sequence
  source: /note="Description of Artificial Sequence: Synthetic oligonucleotide"
cagagctgtgtctcgtcgcg

SEQ ID NO: 2996 - DNA, 20 bp, Artificial Sequence
  source: /note="Description of Artificial Sequence: Synthetic oligonucleotide"
tcagagctgtgtctcgtcgc

SEQ ID NO: 2997 - DNA, 20 bp, Artificial Sequence
  source: /note="Description of Artificial Sequence: Synthetic oligonucleotide"
ctcagagctgtgtctcgtcg

SEQ ID NO: 2998 - DNA, 20 bp, Artificial Sequence
  source: /note="Description of Artificial Sequence: Synthetic oligonucleotide"
gctcagagctgtgtctcgtc

SEQ ID NO: 2999 - DNA, 20 bp, Artificial Sequence
  source: /note="Description of Artificial Sequence: Synthetic oligonucleotide"
ggctcagagctgtgtctcgt

SEQ ID NO: 3000 - DNA, 20 bp, Artificial Sequence
  source: /note="Description of Artificial Sequence: Synthetic oligonucleotide"
tggctcagagctgtgtctcg

SEQ ID NO: 3001 - DNA, 20 bp, Artificial Sequence
  source: /note="Description of Artificial Sequence: Synthetic oligonucleotide"
ctggctcagagctgtgtctc

SEQ ID NO: 3002 - DNA, 20 bp, Artificial Sequence
  source: /note="Description of Artificial Sequence: Synthetic oligonucleotide"
gctggctcagagctgtgtct

SEQ ID NO: 3003 - DNA, 20 bp, Artificial Sequence
  source: /note="Description of Artificial Sequence: Synthetic oligonucleotide"
ggctggctcagagctgtgtc

SEQ ID NO: 3004 - DNA, 20 bp, Artificial Sequence
  source: /note="Description of Artificial Sequence: Synthetic oligonucleotide"
gggctggctcagagctgtgt

SEQ ID NO: 3005 - DNA, 20 bp, Artificial Sequence
  source: /note="Description of Artificial Sequence: Synthetic oligonucleotide"
agggctggctcagagctgtg

SEQ ID NO: 3006 - DNA, 20 bp, Artificial Sequence
  source: /note="Description of Artificial Sequence: Synthetic oligonucleotide"
cagggctggctcagagctgt

SEQ ID NO: 3007 - DNA, 20 bp, Artificial Sequence
  source: /note="Description of Artificial Sequence: Synthetic oligonucleotide"
gcagggctggctcagagctg

SEQ ID NO: 3008 - DNA, 20 bp, Artificial Sequence
  source: /note="Description of Artificial Sequence: Synthetic oligonucleotide"
tgcagggctggctcagagct

SEQ ID NO: 3009 - DNA, 20 bp, Artificial Sequence
  source: /note="Description of Artificial Sequence: Synthetic oligonucleotide"
gtgcagggctggctcagagc

SEQ ID NO: 3010 - DNA, 20 bp, Artificial Sequence
  source: /note="Description of Artificial Sequence: Synthetic oligonucleotide"
cgtgcagggctggctcagag

SEQ ID NO: 3011 - DNA, 20 bp, Artificial Sequence
  source: /note="Description of Artificial Sequence: Synthetic oligonucleotide"
ccgtgcagggctggctcaga

SEQ ID NO: 3012 - DNA, 20 bp, Artificial Sequence
  source: /note="Description of Artificial Sequence: Synthetic oligonucleotide"
tccgtgcagggctggctcag

SEQ ID NO: 3013 - DNA, 20 bp, Artificial Sequence
  source: /note="Description of Artificial Sequence: Synthetic oligonucleotide"
ctccgtgcagggctggctca

SEQ ID NO: 3014 - DNA, 20 bp, Artificial Sequence
  source: /note="Description of Artificial Sequence: Synthetic oligonucleotide"
gctccgtgcagggctggctc

SEQ ID NO: 3015 - DNA, 20 bp, Artificial Sequence
  source: /note="Description of Artificial Sequence: Synthetic oligonucleotide"
agctccgtgcagggctggct

SEQ ID NO: 3016 - DNA, 20 bp, Artificial Sequence
  source: /note="Description of Artificial Sequence: Synthetic oligonucleotide"
gagctccgtgcagggctggc

SEQ ID NO: 3017 - DNA, 20 bp, Artificial Sequence
  source: /note="Description of Artificial Sequence: Synthetic oligonucleotide"
tgagctccgtgcagggctgg

SEQ ID NO: 3018 - DNA, 20 bp, Artificial Sequence
  source: /note="Description of Artificial Sequence: Synthetic oligonucleotide"
ctgagctccgtgcagggctg

SEQ ID NO: 3019 - DNA, 20 bp, Artificial Sequence
  source: /note="Description of Artificial Sequence: Synthetic oligonucleotide"
cctgagctccgtgcagggct

SEQ ID NO: 3020 - DNA, 20 bp, Artificial Sequence
  source: /note="Description of Artificial Sequence: Synthetic oligonucleotide"
gcctgagctccgtgcagggc

SEQ ID NO: 3021 - DNA, 20 bp, Artificial Sequence
  source: /note="Description of Artificial Sequence: Synthetic oligonucleotide"
ggcctgagctccgtgcaggg

SEQ ID NO: 3022 - DNA, 20 bp, Artificial Sequence
  source: /note="Description of Artificial Sequence: Synthetic oligonucleotide"
tggcctgagctccgtgcagg

SEQ ID NO: 3023 - DNA, 20 bp, Artificial Sequence
  source: /note="Description of Artificial Sequence: Synthetic oligonucleotide"
gtggcctgagctccgtgcag

SEQ ID NO: 3024 - DNA, 20 bp, Artificial Sequence
  source: /note="Description of Artificial Sequence: Synthetic oligonucleotide"
ggtggcctgagctccgtgca

SEQ ID NO: 3025 - DNA, 20 bp, Artificial Sequence
  source: /note="Description of Artificial Sequence: Synthetic oligonucleotide"
tggtggcctgagctccgtgc

SEQ ID NO: 3026 - DNA, 20 bp, Artificial Sequence
  source: /note="Description of Artificial Sequence: Synthetic oligonucleotide"
ttggtggcctgagctccgtg

SEQ ID NO: 3027 - DNA, 20 bp, Artificial Sequence
  source: /note="Description of Artificial Sequence: Synthetic oligonucleotide"
cttggtggcctgagctccgt

SEQ ID NO: 3028 - DNA, 20 bp, Artificial Sequence
  source: /note="Description of Artificial Sequence: Synthetic oligonucleotide"
gcttggtggcctgagctccg

SEQ ID NO: 3029 - DNA, 20 bp, Artificial Sequence
  source: /note="Description of Artificial Sequence: Synthetic oligonucleotide"
ggcttggtggcctgagctcc

SEQ ID NO: 3030 - DNA, 20 bp, Artificial Sequence
  source: /note="Description of Artificial Sequence: Synthetic oligonucleotide"
gggcttggtggcctgagctc

SEQ ID NO: 3031 - DNA, 20 bp, Artificial Sequence
  source: /note="Description of Artificial Sequence: Synthetic oligonucleotide"
cgggcttggtggcctgagct

SEQ ID NO: 3032 - DNA, 20 bp, Artificial Sequence
  source: /note="Description of Artificial Sequence: Synthetic oligonucleotide"
ccgggcttggtggcctgagc

SEQ ID NO: 3033 - DNA, 20 bp, Artificial Sequence
  source: /note="Description of Artificial Sequence: Synthetic oligonucleotide"
gtccttcctgaggaccccgg

SEQ ID NO: 3034 - DNA, 20 bp, Artificial Sequence
  source: /note="Description of Artificial Sequence: Synthetic oligonucleotide"
cgtccttcctgaggaccccg

SEQ ID NO: 3035 - DNA, 20 bp, Artificial Sequence
  source: /note="Description of Artificial Sequence: Synthetic oligonucleotide"
acgtccttcctgaggacccc

SEQ ID NO: 3036 - DNA, 20 bp, Artificial Sequence
  source: /note="Description of Artificial Sequence: Synthetic oligonucleotide"
cacgtccttcctgaggaccc

SEQ ID NO: 3037 - DNA, 20 bp, Artificial Sequence
  source: /note="Description of Artificial Sequence: Synthetic oligonucleotide"
ccacgtccttcctgaggacc

SEQ ID NO: 3038 - DNA, 20 bp, Artificial Sequence
  source: /note="Description of Artificial Sequence: Synthetic oligonucleotide"
tccacgtccttcctgaggac

SEQ ID NO: 3039 - DNA, 20 bp, Artificial Sequence
  source: /note="Description of Artificial Sequence: Synthetic oligonucleotide"
ctccacgtccttcctgagga

SEQ ID NO: 3040 - DNA, 20 bp, Artificial Sequence
  source: /note="Description of Artificial Sequence: Synthetic oligonucleotide"
cctccacgtccttcctgagg

SEQ ID NO: 3041 - DNA, 20 bp, Artificial Sequence
  source: /note="Description of Artificial Sequence: Synthetic oligonucleotide"
tcctccacgtccttcctgag

SEQ ID NO: 3042 - DNA, 20 bp, Artificial Sequence
  source: /note="Description of Artificial Sequence: Synthetic oligonucleotide"
ctcctccacgtccttcctga

SEQ ID NO: 3043 - DNA, 20 bp, Artificial Sequence
  source: /note="Description of Artificial Sequence: Synthetic oligonucleotide"
gctcctccacgtccttcctg

SEQ ID NO: 3044 - DNA, 20 bp, Artificial Sequence
  source: /note="Description of Artificial Sequence: Synthetic oligonucleotide"
cgctcctccacgtccttcct

SEQ ID NO: 3045 - DNA, 20 bp, Artificial Sequence
  source: /note="Description of Artificial Sequence: Synthetic oligonucleotide"
acgctcctccacgtccttcc

SEQ ID NO: 3046 - DNA, 20 bp, Artificial Sequence
  source: /note="Description of Artificial Sequence: Synthetic oligonucleotide"
cacgctcctccacgtccttc

SEQ ID NO: 3047 - DNA, 20 bp, Artificial Sequence
  source: /note="Description of Artificial Sequence: Synthetic oligonucleotide"
acacgctcctccacgtcctt

SEQ ID NO: 3048 - DNA, 20 bp, Artificial Sequence
  source: /note="Description of Artificial Sequence: Synthetic oligonucleotide"
cacacgctcctccacgtcct

SEQ ID NO: 3049 - DNA, 20 bp, Artificial Sequence
  source: /note="Description of Artificial Sequence: Synthetic oligonucleotide"
tcacacgctcctccacgtcc

SEQ ID NO: 3050 - DNA, 20 bp, Artificial Sequence
  source: /note="Description of Artificial Sequence: Synthetic oligonucleotide"
ctcacacgctcctccacgtc

SEQ ID NO: 3051 - DNA, 20 bp, Artificial Sequence
  source: /note="Description of Artificial Sequence: Synthetic oligonucleotide"
cctcacacgctcctccacgt

SEQ ID NO: 3052 - DNA, 20 bp, Artificial Sequence
  source: /note="Description of Artificial Sequence: Synthetic oligonucleotide"
tcctcacacgctcctccacg

SEQ ID NO: 3053 - DNA, 20 bp, Artificial Sequence
  source: /note="Description of Artificial Sequence: Synthetic oligonucleotide"
gtcctcacacgctcctccac

SEQ ID NO: 3054 - DNA, 20 bp, Artificial Sequence
  source: /note="Description of Artificial Sequence: Synthetic oligonucleotide"
tgtcctcacacgctcctcca

SEQ ID NO: 3055 - DNA, 20 bp, Artificial Sequence
  source: /note="Description of Artificial Sequence: Synthetic oligonucleotide"
gtgtcctcacacgctcctcc

SEQ ID NO: 3056 - DNA, 20 bp, Artificial Sequence
  source: /note="Description of Artificial Sequence: Synthetic oligonucleotide"
cgtgtcctcacacgctcctc

SEQ ID NO: 3057 - DNA, 20 bp, Artificial Sequence
  source: /note="Description of Artificial Sequence: Synthetic oligonucleotide"
ccgtgtcctcacacgctcct

SEQ ID NO: 3058 - DNA, 20 bp, Artificial Sequence
  source: /note="Description of Artificial Sequence: Synthetic oligonucleotide"
accgtgtcctcacacgctcc

SEQ ID NO: 3059 - DNA, 20 bp, Artificial Sequence
  source: /note="Description of Artificial Sequence: Synthetic oligonucleotide"
caccgtgtcctcacacgctc

SEQ ID NO: 3060 - DNA, 20 bp, Artificial Sequence
  source: /note="Description of Artificial Sequence: Synthetic oligonucleotide"
ccaccgtgtcctcacacgct

SEQ ID NO: 3061 - DNA, 20 bp, Artificial Sequence
  source: /note="Description of Artificial Sequence: Synthetic oligonucleotide"
gccaccgtgtcctcacacgc

SEQ ID NO: 3062 - DNA, 20 bp, Artificial Sequence
  source: /note="Description of Artificial Sequence: Synthetic oligonucleotide"
tgccaccgtgtcctcacacg

SEQ ID NO: 3063 - DNA, 20 bp, Artificial Sequence
  source: /note="Description of Artificial Sequence: Synthetic oligonucleotide"
gtgccaccgtgtcctcacac

SEQ ID NO: 3064 - DNA, 20 bp, Artificial Sequence
  source: /note="Description of Artificial Sequence: Synthetic oligonucleotide"
agtgccaccgtgtcctcaca

SEQ ID NO: 3065 - DNA, 20 bp, Artificial Sequence
  source: /note="Description of Artificial Sequence: Synthetic oligonucleotide"
ctagtgccaccgtgtcctca

SEQ ID NO: 3066 - DNA, 20 bp, Artificial Sequence
  source: /note="Description of Artificial Sequence: Synthetic oligonucleotide"
gctagtgccaccgtgtcctc

SEQ ID NO: 3067 - DNA, 20 bp, Artificial Sequence
  source: /note="Description of Artificial Sequence: Synthetic oligonucleotide"
cgctagtgccaccgtgtcct

SEQ ID NO: 3068 - DNA, 20 bp, Artificial Sequence
  source: /note="Description of Artificial Sequence: Synthetic oligonucleotide"
acgctagtgccaccgtgtcc

SEQ ID NO: 3069 - DNA, 20 bp, Artificial Sequence
  source: /note="Description of Artificial Sequence: Synthetic oligonucleotide"
cacgctagtgccaccgtgtc

SEQ ID NO: 3070 - DNA, 20 bp, Artificial Sequence
  source: /note="Description of Artificial Sequence: Synthetic oligonucleotide"
tcacgctagtgccaccgtgt

SEQ ID NO: 3071 - DNA, 20 bp, Artificial Sequence
  source: /note="Description of Artificial Sequence: Synthetic oligonucleotide"
gtcacgctagtgccaccgtg

SEQ ID NO: 3072 - DNA, 20 bp, Artificial Sequence
  source: /note="Description of Artificial Sequence: Synthetic oligonucleotide"
ggtcacgctagtgccaccgt

SEQ ID NO: 3073 - DNA, 20 bp, Artificial Sequence
  source: /note="Description of Artificial Sequence: Synthetic oligonucleotide"
gggtcacgctagtgccaccg

SEQ ID NO: 3074 - DNA, 20 bp, Artificial Sequence
  source: /note="Description of Artificial Sequence: Synthetic oligonucleotide"
agggtcacgctagtgccacc

SEQ ID NO: 3075 - DNA, 20 bp, Artificial Sequence
  source: /note="Description of Artificial Sequence: Synthetic oligonucleotide"
cagggtcacgctagtgccac

SEQ ID NO: 3076 - DNA, 20 bp, Artificial Sequence
  source: /note="Description of Artificial Sequence: Synthetic oligonucleotide"
ccagggtcacgctagtgcca

SEQ ID NO: 3077 - DNA, 20 bp, Artificial Sequence
  source: /note="Description of Artificial Sequence: Synthetic oligonucleotide"
cccagggtcacgctagtgcc

SEQ ID NO: 3078 - DNA, 20 bp, Artificial Sequence
  source: /note="Description of Artificial Sequence: Synthetic oligonucleotide"
ccccagggtcacgctagtgc

SEQ ID NO: 3079 - DNA, 20 bp, Artificial Sequence
  source: /note="Description of Artificial Sequence: Synthetic oligonucleotide"
tccccagggtcacgctagtg

SEQ ID NO: 3080 - DNA, 20 bp, Artificial Sequence
  source: /note="Description of Artificial Sequence: Synthetic oligonucleotide"
atccccagggtcacgctagt

SEQ ID NO: 3081 - DNA, 20 bp, Artificial Sequence
  source: /note="Description of Artificial Sequence: Synthetic oligonucleotide"
catccccagggtcacgctag

SEQ ID NO: 3082 - DNA, 20 bp, Artificial Sequence
  source: /note="Description of Artificial Sequence: Synthetic oligonucleotide"
ccatccccagggtcacgcta

SEQ ID NO: 3083 - DNA, 20 bp, Artificial Sequence
  source: /note="Description of Artificial Sequence: Synthetic oligonucleotide"
gccatccccagggtcacgct

SEQ ID NO: 3084 - DNA, 20 bp, Artificial Sequence
  source: /note="Description of Artificial Sequence: Synthetic oligonucleotide"
tgccatccccagggtcacgc

SEQ ID NO: 3085 - DNA, 20 bp, Artificial Sequence
  source: /note="Description of Artificial Sequence: Synthetic oligonucleotide"
gtgccatccccagggtcacg

SEQ ID NO: 3086 - DNA, 20 bp, Artificial Sequence
  source: /note="Description of Artificial Sequence: Synthetic oligonucleotide"
tgtgccatccccagggtcac

SEQ ID NO: 3087 - DNA, 20 bp, Artificial Sequence
  source: /note="Description of Artificial Sequence: Synthetic oligonucleotide"
gtgtgccatccccagggtca

SEQ ID NO: 3088 - DNA, 20 bp, Artificial Sequence
  source: /note="Description of Artificial Sequence: Synthetic oligonucleotide"
agtgtgccatccccagggtc

SEQ ID NO: 3089 - DNA, 20 bp, Artificial Sequence
  source: /note="Description of Artificial Sequence: Synthetic oligonucleotide"
gagtgtgccatccccagggt

SEQ ID NO: 3090 - DNA, 20 bp, Artificial Sequence
  source: /note="Description of Artificial Sequence: Synthetic oligonucleotide"
agagtgtgccatccccaggg

SEQ ID NO: 3091 - DNA, 20 bp, Artificial Sequence
  source: /note="Description of Artificial Sequence: Synthetic oligonucleotide"
tagagtgtgccatccccagg

SEQ ID NO: 3092 - DNA, 20 bp, Artificial Sequence
  source: /note="Description of Artificial Sequence: Synthetic oligonucleotide"
gtagagtgtgccatccccag

SEQ ID NO: 3093 - DNA, 20 bp, Artificial Sequence
  source: /note="Description of Artificial Sequence: Synthetic oligonucleotide"
gagtagagtgtgccatcccc

SEQ ID NO: 3094 - DNA, 20 bp, Artificial Sequence
  source: /note="Description of Artificial Sequence: Synthetic oligonucleotide"
tgagtagagtgtgccatccc

SEQ ID NO: 3095 - DNA, 20 bp, Artificial Sequence
  source: /note="Description of Artificial Sequence: Synthetic oligonucleotide"
gtgagtagagtgtgccatcc

SEQ ID NO: 3096 - DNA, 20 bp, Artificial Sequence
  source: /note="Description of Artificial Sequence: Synthetic oligonucleotide"
ggtgagtagagtgtgccatc

SEQ ID NO: 3097 - DNA, 20 bp, Artificial Sequence
  source: /note="Description of Artificial Sequence: Synthetic oligonucleotide"
tggtgagtagagtgtgccat

SEQ ID NO: 3098 - DNA, 20 bp, Artificial Sequence
  source: /note="Description of Artificial Sequence: Synthetic oligonucleotide"
atggtgagtagagtgtgcca

SEQ ID NO: 3099 - DNA, 20 bp, Artificial Sequence
  source: /note="Description of Artificial Sequence: Synthetic oligonucleotide"
catggtgagtagagtgtgcc

SEQ ID NO: 3100 - DNA, 20 bp, Artificial Sequence
  source: /note="Description of Artificial Sequence: Synthetic oligonucleotide"
ccatggtgagtagagtgtgc

SEQ ID NO: 3101 - DNA, 20 bp, Artificial Sequence
  source: /note="Description of Artificial Sequence: Synthetic oligonucleotide"
gccatggtgagtagagtgtg

SEQ ID NO: 3102 - DNA, 20 bp, Artificial Sequence
  source: /note="Description of Artificial Sequence: Synthetic oligonucleotide"
agccatggtgagtagagtgt

SEQ ID NO: 3103 - DNA, 20 bp, Artificial Sequence
  source: /note="Description of Artificial Sequence: Synthetic oligonucleotide"
gagccatggtgagtagagtg

SEQ ID NO: 3104 - DNA, 20 bp, Artificial Sequence
  source: /note="Description of Artificial Sequence: Synthetic oligonucleotide"
ggagccatggtgagtagagt

SEQ ID NO: 3105 - DNA, 20 bp, Artificial Sequence
  source: /note="Description of Artificial Sequence: Synthetic oligonucleotide"
aggagccatggtgagtagag

SEQ ID NO: 3106 - DNA, 20 bp, Artificial Sequence
  source: /note="Description of Artificial Sequence: Synthetic oligonucleotide"
caggagccatggtgagtaga

SEQ ID NO: 3107 - DNA, 20 bp, Artificial Sequence
  source: /note="Description of Artificial Sequence: Synthetic oligonucleotide"
ccaggagccatggtgagtag

SEQ ID NO: 3108 - DNA, 20 bp, Artificial Sequence
  source: /note="Description of Artificial Sequence: Synthetic oligonucleotide"
cccaggagccatggtgagta

SEQ ID NO: 3109 - DNA, 20 bp, Artificial Sequence
  source: /note="Description of Artificial Sequence: Synthetic oligonucleotide"
tcccaggagccatggtgagt

SEQ ID NO: 3110 - DNA, 20 bp, Artificial Sequence
  source: /note="Description of Artificial Sequence: Synthetic oligonucleotide"
gtcccaggagccatggtgag

SEQ ID NO: 3111 - DNA, 20 bp, Artificial Sequence
  source: /note="Description of Artificial Sequence: Synthetic oligonucleotide"
agtcccaggagccatggtga

SEQ ID NO: 3112 - DNA, 20 bp, Artificial Sequence
  source: /note="Description of Artificial Sequence: Synthetic oligonucleotide"
gagtcccaggagccatggtg

SEQ ID NO: 3113 - DNA, 20 bp, Artificial Sequence
  source: /note="Description of Artificial Sequence: Synthetic oligonucleotide"
ggagtcccaggagccatggt

SEQ ID NO: 3114 - DNA, 20 bp, Artificial Sequence
  source: /note="Description of Artificial Sequence: Synthetic oligonucleotide"
tggagtcccaggagccatgg

SEQ ID NO: 3115 - DNA, 20 bp, Artificial Sequence
  source: /note="Description of Artificial Sequence: Synthetic oligonucleotide"
gtggagtcccaggagccatg

SEQ ID NO: 3116 - DNA, 20 bp, Artificial Sequence
  source: /note="Description of Artificial Sequence: Synthetic oligonucleotide"
ggtggagtcccaggagccat

SEQ ID NO: 3117 - DNA, 20 bp, Artificial Sequence
  source: /note="Description of Artificial Sequence: Synthetic oligonucleotide"
gggtggagtcccaggagcca

SEQ ID NO: 3118 - DNA, 20 bp, Artificial Sequence
  source: /note="Description of Artificial Sequence: Synthetic oligonucleotide"
agggtggagtcccaggagcc

SEQ ID NO: 3119 - DNA, 20 bp, Artificial Sequence
  source: /note="Description of Artificial Sequence: Synthetic oligonucleotide"
cagggtggagtcccaggagc

SEQ ID NO: 3120 - DNA, 20 bp, Artificial Sequence
  source: /note="Description of Artificial Sequence: Synthetic oligonucleotide"
ccagggtggagtcccaggag

SEQ ID NO: 3121 - DNA, 20 bp, Artificial Sequence
  source: /note="Description of Artificial Sequence: Synthetic oligonucleotide"
tccagggtggagtcccagga

SEQ ID NO: 3122 - DNA, 20 bp, Artificial Sequence
  source: /note="Description of Artificial Sequence: Synthetic oligonucleotide"
ttccagggtggagtcccagg

SEQ ID NO: 3123 - DNA, 20 bp, Artificial Sequence
  source: /note="Description of Artificial Sequence: Synthetic oligonucleotide"
tttccagggtggagtcccag

SEQ ID NO: 3124 - DNA, 20 bp, Artificial Sequence
  source: /note="Description of Artificial Sequence: Synthetic oligonucleotide"
cctttccagggtggagtccc

SEQ ID NO: 3125 - DNA, 20 bp, Artificial Sequence
  source: /note="Description of Artificial Sequence: Synthetic oligonucleotide"
tcctttccagggtggagtcc

SEQ ID NO: 3126 - DNA, 20 bp, Artificial Sequence
  source: /note="Description of Artificial Sequence: Synthetic oligonucleotide"
ctcctttccagggtggagtc

SEQ ID NO: 3127 - DNA, 20 bp, Artificial Sequence
  source: /note="Description of Artificial Sequence: Synthetic oligonucleotide"
gctcctttccagggtggagt

SEQ ID NO: 3128 - DNA, 20 bp, Artificial Sequence
  source: /note="Description of Artificial Sequence: Synthetic oligonucleotide"
ggctcctttccagggtggag

SEQ ID NO: 3129 - DNA, 20 bp, Artificial Sequence
  source: /note="Description of Artificial Sequence: Synthetic oligonucleotide"
gggctcctttccagggtgga

SEQ ID NO: 3130 - DNA, 20 bp, Artificial Sequence
  source: /note="Description of Artificial Sequence: Synthetic oligonucleotide"
tggccctccccccgcatgag

SEQ ID NO: 3131 - DNA, 20 bp, Artificial Sequence
  source: /note="Description of Artificial Sequence: Synthetic oligonucleotide"
ctggccctccccccgcatga

SEQ ID NO: 3132 - DNA, 20 bp, Artificial Sequence
  source: /note="Description of Artificial Sequence: Synthetic oligonucleotide"
agctggccctccccccgcat

SEQ ID NO: 3133 - DNA, 20 bp, Artificial Sequence
  source: /note="Description of Artificial Sequence: Synthetic oligonucleotide"
ctctcctcactagcctgcag

SEQ ID NO: 3134 - DNA, 20 bp, Artificial Sequence
  source: /note="Description of Artificial Sequence: Synthetic oligonucleotide"
actctcctcactagcctgca

SEQ ID NO: 3135 - DNA, 20 bp, Artificial Sequence
  source: /note="Description of Artificial Sequence: Synthetic oligonucleotide"
aactctcctcactagcctgc

SEQ ID NO: 3136 - DNA, 20 bp, Artificial Sequence
  source: /note="Description of Artificial Sequence: Synthetic oligonucleotide"
aaactctcctcactagcctg

SEQ ID NO: 3137 - DNA, 20 bp, Artificial Sequence
  source: /note="Description of Artificial Sequence: Synthetic oligonucleotide"
aaaaactctcctcactagcc

SEQ ID NO: 3138 - DNA, 20 bp, Artificial Sequence
  source: /note="Description of Artificial Sequence: Synthetic oligonucleotide"
aaaaaactctcctcactagc

SEQ ID NO: 3139 - DNA, 20 bp, Artificial Sequence
  source: /note="Description of Artificial Sequence: Synthetic oligonucleotide"
taaaaaactctcctcactag

SEQ ID NO: 3140 - DNA, 20 bp, Artificial Sequence
  source: /note="Description of Artificial Sequence: Synthetic oligonucleotide"
gttaaaaaactctcctcact

SEQ ID NO: 3141 - DNA, 20 bp, Artificial Sequence
  source: /note="Description of Artificial Sequence: Synthetic oligonucleotide"
ggttaaaaaactctcctcac

SEQ ID NO: 3142 - DNA, 20 bp, Artificial Sequence
  source: /note="Description of Artificial Sequence: Synthetic oligonucleotide"
aggttaaaaaactctcctca

SEQ ID NO: 3143 - DNA, 20 bp, Artificial Sequence
  source: /note="Description of Artificial Sequence: Synthetic oligonucleotide"
taggttaaaaaactctcctc

SEQ ID NO: 3144 - DNA, 20 bp, Artificial Sequence
  source: /note="Description of Artificial Sequence: Synthetic oligonucleotide"
cgacgtgtaaaaataggtta

SEQ ID NO: 3145 - DNA, 20 bp, Artificial Sequence
  source: /note="Description of Artificial Sequence: Synthetic oligonucleotide"
tcgacgtgtaaaaataggtt

SEQ ID NO: 3146 - DNA, 20 bp, Artificial Sequence
  source: /note="Description of Artificial Sequence: Synthetic oligonucleotide"
atcgacgtgtaaaaataggt

SEQ ID NO: 3147 - DNA, 20 bp, Artificial Sequence
  source: /note="Description of Artificial Sequence: Synthetic oligonucleotide"
catcgacgtgtaaaaatagg

SEQ ID NO: 3148 - DNA, 20 bp, Artificial Sequence
  source: /note="Description of Artificial Sequence: Synthetic oligonucleotide"
gcatcgacgtgtaaaaatag

SEQ ID NO: 3149 - DNA, 20 bp, Artificial Sequence
  source: /note="Description of Artificial Sequence: Synthetic oligonucleotide"
tgcatcgacgtgtaaaaata

SEQ ID NO: 3150 - DNA, 20 bp, Artificial Sequence
  source: /note="Description of Artificial Sequence: Synthetic oligonucleotide"
ctgcatcgacgtgtaaaaat

SEQ ID NO: 3151 - DNA, 20 bp, Artificial Sequence
  source: /note="Description of Artificial Sequence: Synthetic oligonucleotide"
actgcatcgacgtgtaaaaa

SEQ ID NO: 3152 - DNA, 20 bp, Artificial Sequence
  source: /note="Description of Artificial Sequence: Synthetic oligonucleotide"
gactgcatcgacgtgtaaaa

SEQ ID NO: 3153 - DNA, 20 bp, Artificial Sequence
  source: /note="Description of Artificial Sequence: Synthetic oligonucleotide"
ggactgcatcgacgtgtaaa

SEQ ID NO: 3154 - DNA, 20 bp, Artificial Sequence
  source: /note="Description of Artificial Sequence: Synthetic oligonucleotide"
tggactgcatcgacgtgtaa

SEQ ID NO: 3155 - DNA, 20 bp, Artificial Sequence
  source: /note="Description of Artificial Sequence: Synthetic oligonucleotide"
gtggactgcatcgacgtgta

SEQ ID NO: 3156 - DNA, 20 bp, Artificial Sequence
  source: /note="Description of Artificial Sequence: Synthetic oligonucleotide"
agtggactgcatcgacgtgt

SEQ ID NO: 3157 - DNA, 20 bp, Artificial Sequence
  source: /note="Description of Artificial Sequence: Synthetic oligonucleotide"
aagtggactgcatcgacgtg

SEQ ID NO: 3158 - DNA, 20 bp, Artificial Sequence
  source: /note="Description of Artificial Sequence: Synthetic oligonucleotide"
gaagtggactgcatcgacgt

SEQ ID NO: 3159 - DNA, 20 bp, Artificial Sequence
  source: /note="Description of Artificial Sequence: Synthetic oligonucleotide"
agaagtggactgcatcgacg

SEQ ID NO: 3160 - DNA, 20 bp, Artificial Sequence
  source: /note="Description of Artificial Sequence: Synthetic oligonucleotide"
gagaagtggactgcatcgac

SEQ ID NO: 3161 - DNA, 20 bp, Artificial Sequence
  source: /note="Description of Artificial Sequence: Synthetic oligonucleotide"
agagaagtggactgcatcga

SEQ ID NO: 3162 - DNA, 20 bp, Artificial Sequence
  source: /note="Description of Artificial Sequence: Synthetic oligonucleotide"
aagagaagtggactgcatcg

SEQ ID NO: 3163 - DNA, 20 bp, Artificial Sequence
  source: /note="Description of Artificial Sequence: Synthetic oligonucleotide"
aaagagaagtggactgcatc

SEQ ID NO: 3164 - DNA, 20 bp, Artificial Sequence
  source: /note="Description of Artificial Sequence: Synthetic oligonucleotide"
taaagagaagtggactgcat

SEQ ID NO: 3165 - DNA, 20 bp, Artificial Sequence
  source: /note="Description of Artificial Sequence: Synthetic oligonucleotide"
gtaaagagaagtggactgca

SEQ ID NO: 3166 - DNA, 20 bp, Artificial Sequence
  source: /note="Description of Artificial Sequence: Synthetic oligonucleotide"
tgtaaagagaagtggactgc

SEQ ID NO: 3167 - DNA, 20 bp, Artificial Sequence
  source: /note="Description of Artificial Sequence: Synthetic oligonucleotide"
gtgtaaagagaagtggactg

SEQ ID NO: 3168 - DNA, 20 bp, Artificial Sequence
  source: /note="Description of Artificial Sequence: Synthetic oligonucleotide"
tgtgtaaagagaagtggact

SEQ ID NO: 3169 - DNA, 20 bp, Artificial Sequence
  source: /note="Description of Artificial Sequence: Synthetic oligonucleotide"
ctgtgtaaagagaagtggac

SEQ ID NO: 3170 - DNA, 20 bp, Artificial Sequence
  source: /note="Description of Artificial Sequence: Synthetic oligonucleotide"
tctgtgtaaagagaagtgga

SEQ ID NO: 3171 - DNA, 20 bp, Artificial Sequence
  source: /note="Description of Artificial Sequence: Synthetic oligonucleotide"
atctgtgtaaagagaagtgg

SEQ ID NO: 3172 - DNA, 20 bp, Artificial Sequence
  source: /note="Description of Artificial Sequence: Synthetic oligonucleotide"
catctgtgtaaagagaagtg

SEQ ID NO: 3173 - DNA, 20 bp, Artificial Sequence
  source: /note="Description of Artificial Sequence: Synthetic oligonucleotide"
acatctgtgtaaagagaagt

SEQ ID NO: 3174 - DNA, 20 bp, Artificial Sequence
  source: /note="Description of Artificial Sequence: Synthetic oligonucleotide"
tacatctgtgtaaagagaag

SEQ ID NO: 3175 - DNA, 20 bp, Artificial Sequence
  source: /note="Description of Artificial Sequence: Synthetic oligonucleotide"
gtacatctgtgtaaagagaa

SEQ ID NO: 3176 - DNA, 20 bp, Artificial Sequence
  source: /note="Description of Artificial Sequence: Synthetic oligonucleotide"
ggtacatctgtgtaaagaga

SEQ ID NO: 3177 - DNA, 20 bp, Artificial Sequence
  source: /note="Description of Artificial Sequence: Synthetic oligonucleotide"
cggtacatctgtgtaaagag

SEQ ID NO: 3178 - DNA, 20 bp, Artificial Sequence
  source: /note="Description of Artificial Sequence: Synthetic oligonucleotide"
gcggtacatctgtgtaaaga

SEQ ID NO: 3179 - DNA, 20 bp, Artificial Sequence
  source: /note="Description of Artificial Sequence: Synthetic oligonucleotide"
tgcggtacatctgtgtaaag

SEQ ID NO: 3180 - DNA, 20 bp, Artificial Sequence
  source: /note="Description of Artificial Sequence: Synthetic oligonucleotide"
ttgcggtacatctgtgtaaa

SEQ ID NO: 3181 - DNA, 20 bp, Artificial Sequence
  source: /note="Description of Artificial Sequence: Synthetic oligonucleotide"
gttgcggtacatctgtgtaa

SEQ ID NO: 3182 - DNA, 20 bp, Artificial Sequence
  source: /note="Description of Artificial Sequence: Synthetic oligonucleotide"
agttgcggtacatctgtgta

SEQ ID NO: 3183 - DNA, 20 bp, Artificial Sequence
  source: /note="Description of Artificial Sequence: Synthetic oligonucleotide"
gagttgcggtacatctgtgt

SEQ ID NO: 3184 - DNA, 20 bp, Artificial Sequence
  source: /note="Description of Artificial Sequence: Synthetic oligonucleotide"
cgagttgcggtacatctgtg

SEQ ID NO: 3185 - DNA, 20 bp, Artificial Sequence
  source: /note="Description of Artificial Sequence: Synthetic oligonucleotide"
acgagttgcggtacatctgt

SEQ ID NO: 3186 - DNA, 20 bp, Artificial Sequence
  source: /note="Description of Artificial Sequence: Synthetic oligonucleotide"
cacgagttgcggtacatctg

SEQ ID NO: 3187 - DNA, 20 bp, Artificial Sequence
  source: /note="Description of Artificial Sequence: Synthetic oligonucleotide"
tcacgagttgcggtacatct

SEQ ID NO: 3188 - DNA, 20 bp, Artificial Sequence
  source: /note="Description of Artificial Sequence: Synthetic oligonucleotide"
gtcacgagttgcggtacatc

SEQ ID NO: 3189 - DNA, 20 bp, Artificial Sequence
  source: /note="Description of Artificial Sequence: Synthetic oligonucleotide"
ggtcacgagttgcggtacat

SEQ ID NO: 3190 - DNA, 20 bp, Artificial Sequence
  source: /note="Description of Artificial Sequence: Synthetic oligonucleotide"
tggtcacgagttgcggtaca

SEQ ID NO: 3191 - DNA, 20 bp, Artificial Sequence
  source: /note="Description of Artificial Sequence: Synthetic oligonucleotide"
ctggtcacgagttgcggtac

SEQ ID NO: 3192 - DNA, 20 bp, Artificial Sequence
  source: /note="Description of Artificial Sequence: Synthetic oligonucleotide"
cctggtcacgagttgcggta

SEQ ID NO: 3193 - DNA, 20 bp, Artificial Sequence
  source: /note="Description of Artificial Sequence: Synthetic oligonucleotide"
ccctggtcacgagttgcggt

SEQ ID NO: 3194 - DNA, 20 bp, Artificial Sequence
  source: /note="Description of Artificial Sequence: Synthetic oligonucleotide"
gccctggtcacgagttgcgg

SEQ ID NO: 3195 - DNA, 20 bp, Artificial Sequence
  source: /note="Description of Artificial Sequence: Synthetic oligonucleotide"
agccctggtcacgagttgcg

SEQ ID NO: 3196 - DNA, 20 bp, Artificial Sequence
  source: /note="Description of Artificial Sequence: Synthetic oligonucleotide"
cagccctggtcacgagttgc

SEQ ID NO: 3197 - DNA, 20 bp, Artificial Sequence
  source: /note="Description of Artificial Sequence: Synthetic oligonucleotide"
ccagccctggtcacgagttg

SEQ ID NO: 3198 - DNA, 20 bp, Artificial Sequence
  source: /note="Description of Artificial Sequence: Synthetic oligonucleotide"
gccagccctggtcacgagtt

SEQ ID NO: 3199 - DNA, 20 bp, Artificial Sequence
  source: /note="Description of Artificial Sequence: Synthetic oligonucleotide"
agccagccctggtcacgagt

SEQ ID NO: 3200 - DNA, 20 bp, Artificial Sequence
  source: /note="Description of Artificial Sequence: Synthetic oligonucleotide"
cagccagccctggtcacgag

SEQ ID NO: 3201 - DNA, 20 bp, Artificial Sequence
  source: /note="Description of Artificial Sequence: Synthetic oligonucleotide"
ccagccagccctggtcacga

SEQ ID NO: 3202 - DNA, 20 bp, Artificial Sequence
  source: /note="Description of Artificial Sequence: Synthetic oligonucleotide"
cccagccagccctggtcacg

SEQ ID NO: 3203 - DNA, 20 bp, Artificial Sequence
  source: /note="Description of Artificial Sequence: Synthetic oligonucleotide"
tcccagccagccctggtcac

SEQ ID NO: 3204 - DNA, 20 bp, Artificial Sequence
  source: /note="Description of Artificial Sequence: Synthetic oligonucleotide"
ctcccagccagccctggtca

SEQ ID NO: 3205 - DNA, 20 bp, Artificial Sequence
  source: /note="Description of Artificial Sequence: Synthetic oligonucleotide"
cctcccagccagccctggtc

SEQ ID NO: 3206 - DNA, 20 bp, Artificial Sequence
  source: /note="Description of Artificial Sequence: Synthetic oligonucleotide"
ccctcccagccagccctggt

SEQ ID NO: 3207 - DNA, 20 bp, Artificial Sequence
  source: /note="Description of Artificial Sequence: Synthetic oligonucleotide"
tgccctcccagccagccctg

SEQ ID NO: 3208 - DNA, 20 bp, Artificial Sequence
  source: /note="Description of Artificial Sequence: Synthetic oligonucleotide"
ttgccctcccagccagccct

SEQ ID NO: 3209 - DNA, 20 bp, Artificial Sequence
  source: /note="Description of Artificial Sequence: Synthetic oligonucleotide"
gttgccctcccagccagccc

SEQ ID NO: 3210 - DNA, 20 bp, Artificial Sequence
  source: /note="Description of Artificial Sequence: Synthetic oligonucleotide"
cgttgccctcccagccagcc

SEQ ID NO: 3211 - DNA, 20 bp, Artificial Sequence
  source: /note="Description of Artificial Sequence: Synthetic oligonucleotide"
gcgttgccctcccagccagc

SEQ ID NO: 3212 - DNA, 20 bp, Artificial Sequence
  source: /note="Description of Artificial Sequence: Synthetic oligonucleotide"
tgcgttgccctcccagccag

SEQ ID NO: 3213 - DNA, 20 bp, Artificial Sequence
  source: /note="Description of Artificial Sequence: Synthetic oligonucleotide"
ctgcgttgccctcccagcca

SEQ ID NO: 3214 - DNA, 20 bp, Artificial Sequence
  source: /note="Description of Artificial Sequence: Synthetic oligonucleotide"
cctgcgttgccctcccagcc

SEQ ID NO: 3215 - DNA, 20 bp, Artificial Sequence
  source: /note="Description of Artificial Sequence: Synthetic oligonucleotide"
ccctgcgttgccctcccagc

SEQ ID NO: 3216 - DNA, 20 bp, Artificial Sequence
  source: /note="Description of Artificial Sequence: Synthetic oligonucleotide"
tccctgcgttgccctcccag

SEQ ID NO: 3217 - DNA, 20 bp, Artificial Sequence
  source: /note="Description of Artificial Sequence: Synthetic oligonucleotide"
gtccctgcgttgccctccca

SEQ ID NO: 3218 - DNA, 20 bp, Artificial Sequence
  source: /note="Description of Artificial Sequence: Synthetic oligonucleotide"
agtccctgcgttgccctccc

SEQ ID NO: 3219 - DNA, 20 bp, Artificial Sequence
  source: /note="Description of Artificial Sequence: Synthetic oligonucleotide"
cagtccctgcgttgccctcc

SEQ ID NO: 3220 - DNA, 20 bp, Artificial Sequence
  source: /note="Description of Artificial Sequence: Synthetic oligonucleotide"
ccagtccctgcgttgccctc

SEQ ID NO: 3221 - DNA, 20 bp, Artificial Sequence
  source: /note="Description of Artificial Sequence: Synthetic oligonucleotide"
tccagtccctgcgttgccct

SEQ ID NO: 3222 - DNA, 20 bp, Artificial Sequence
  source: /note="Description of Artificial Sequence: Synthetic oligonucleotide"
gtccagtccctgcgttgccc

SEQ ID NO: 3223 - DNA, 20 bp, Artificial Sequence
  source: /note="Description of Artificial Sequence: Synthetic oligonucleotide"
cgtccagtccctgcgttgcc

SEQ ID NO: 3224 - DNA, 20 bp, Artificial Sequence
  source: /note="Description of Artificial Sequence: Synthetic oligonucleotide"
gcgtccagtccctgcgttgc

SEQ ID NO: 3225 - DNA, 20 bp, Artificial Sequence
  source: /note="Description of Artificial Sequence: Synthetic oligonucleotide"
ggcgtccagtccctgcgttg

SEQ ID NO: 3226 - DNA, 20 bp, Artificial Sequence
  source: /note="Description of Artificial Sequence: Synthetic oligonucleotide"
gggcgtccagtccctgcgtt

SEQ ID NO: 3227 - DNA, 20 bp, Artificial Sequence
  source: /note="Description of Artificial Sequence: Synthetic oligonucleotide"
agggcgtccagtccctgcgt

SEQ ID NO: 3228 - DNA, 20 bp, Artificial Sequence
  source: /note="Description of Artificial Sequence: Synthetic oligonucleotide"
tagggcgtccagtccctgcg

SEQ ID NO: 3229 - DNA, 20 bp, Artificial Sequence
  source: /note="Description of Artificial Sequence: Synthetic oligonucleotide"
gtagggcgtccagtccctgc

SEQ ID NO: 3230 - DNA, 20 bp, Artificial Sequence
  source: /note="Description of Artificial Sequence: Synthetic oligonucleotide"
tgtagggcgtccagtccctg

SEQ ID NO: 3231 - DNA, 20 bp, Artificial Sequence
  source: /note="Description of Artificial Sequence: Synthetic oligonucleotide"
ctgtagggcgtccagtccct

SEQ ID NO: 3232 - DNA, 20 bp, Artificial Sequence
  source: /note="Description of Artificial Sequence: Synthetic oligonucleotide"
cctgtagggcgtccagtccc

SEQ ID NO: 3233 - DNA, 20 bp, Artificial Sequence
  source: /note="Description of Artificial Sequence: Synthetic oligonucleotide"
ccctgtagggcgtccagtcc

SEQ ID NO: 3234 - DNA, 20 bp, Artificial Sequence
  source: /note="Description of Artificial Sequence: Synthetic oligonucleotide"
gccctgtagggcgtccagtc

SEQ ID NO: 3235 - DNA, 20 bp, Artificial Sequence
  source: /note="Description of Artificial Sequence: Synthetic oligonucleotide"
ggccctgtagggcgtccagt

SEQ ID NO: 3236 - DNA, 20 bp, Artificial Sequence
  source: /note="Description of Artificial Sequence: Synthetic oligonucleotide"
cggccctgtagggcgtccag

SEQ ID NO: 3237 - DNA, 20 bp, Artificial Sequence
  source: /note="Description of Artificial Sequence: Synthetic oligonucleotide"
tcggccctgtagggcgtcca

SEQ ID NO: 3238 - DNA, 20 bp, Artificial Sequence
  source: /note="Description of Artificial Sequence: Synthetic oligonucleotide"
ctcggccctgtagggcgtcc

SEQ ID NO: 3239 - DNA, 20 bp, Artificial Sequence
  source: /note="Description of Artificial Sequence: Synthetic oligonucleotide"
gctcggccctgtagggcgtc

SEQ ID NO: 3240 - DNA, 20 bp, Artificial Sequence
  source: /note="Description of Artificial Sequence: Synthetic oligonucleotide"
ggctcggccctgtagggcgt

SEQ ID NO: 3241 - DNA, 20 bp, Artificial Sequence
  source: /note="Description of Artificial Sequence: Synthetic oligonucleotide"
tgggctcggccctgtagggc

SEQ ID NO: 3242 - DNA, 20 bp, Artificial Sequence
  source: /note="Description of Artificial Sequence: Synthetic oligonucleotide"
ctgggctcggccctgtaggg

SEQ ID NO: 3243 - DNA, 20 bp, Artificial Sequence
  source: /note="Description of Artificial Sequence: Synthetic oligonucleotide"
cctgggctcggccctgtagg

SEQ ID NO: 3244 - DNA, 20 bp, Artificial Sequence
  source: /note="Description of Artificial Sequence: Synthetic oligonucleotide"
gcctgggctcggccctgtag

SEQ ID NO: 3245 - DNA, 20 bp, Artificial Sequence
  source: /note="Description of Artificial Sequence: Synthetic oligonucleotide"
agcctgggctcggccctgta

SEQ ID NO: 3246 - DNA, 20 bp, Artificial Sequence
  source: /note="Description of Artificial Sequence: Synthetic oligonucleotide"
cagcctgggctcggccctgt

SEQ ID NO: 3247 - DNA, 20 bp, Artificial Sequence
  source: /note="Description of Artificial Sequence: Synthetic oligonucleotide"
acagcctgggctcggccctg

SEQ ID NO: 3248 - DNA, 20 bp, Artificial Sequence
  source: /note="Description of Artificial Sequence: Synthetic oligonucleotide"
cacagcctgggctcggccct

SEQ ID NO: 3249 - DNA, 20 bp, Artificial Sequence
  source: /note="Description of Artificial Sequence: Synthetic oligonucleotide"
agcacagcctgggctcggcc

SEQ ID NO: 3250 - DNA, 20 bp, Artificial Sequence
  source: /note="Description of Artificial Sequence: Synthetic oligonucleotide"
cagcacagcctgggctcggc

SEQ ID NO: 3251 - DNA, 20 bp, Artificial Sequence
  source: /note="Description of Artificial Sequence: Synthetic oligonucleotide"
ccagcacagcctgggctcgg

SEQ ID NO: 3252 - DNA, 20 bp, Artificial Sequence
  source: /note="Description of Artificial Sequence: Synthetic oligonucleotide"
tccagcacagcctgggctcg

SEQ ID NO: 3253 - DNA, 20 bp, Artificial Sequence
  source: /note="Description of Artificial Sequence: Synthetic oligonucleotide"
ctccagcacagcctgggctc

SEQ ID NO: 3254 - DNA, 20 bp, Artificial Sequence
  source: /note="Description of Artificial Sequence: Synthetic oligonucleotide"
cctccagcacagcctgggct

SEQ ID NO: 3255 - DNA, 20 bp, Artificial Sequence
  source: /note="Description of Artificial Sequence: Synthetic oligonucleotide"
ccctccagcacagcctgggc

SEQ ID NO: 3256 - DNA, 20 bp, Artificial Sequence
  source: /note="Description of Artificial Sequence: Synthetic oligonucleotide"
accctccagcacagcctggg

SEQ ID NO: 3257 - DNA, 20 bp, Artificial Sequence
  source: /note="Description of Artificial Sequence: Synthetic oligonucleotide"
caccctccagcacagcctgg

SEQ ID NO: 3258 - DNA, 20 bp, Artificial Sequence
  source: /note="Description of Artificial Sequence: Synthetic oligonucleotide"
ccaccctccagcacagcctg

SEQ ID NO: 3259 - DNA, 20 bp, Artificial Sequence
  source: /note="Description of Artificial Sequence: Synthetic oligonucleotide"
cccaccctccagcacagcct

SEQ ID NO: 3260 - DNA, 20 bp, Artificial Sequence
  source: /note="Description of Artificial Sequence: Synthetic oligonucleotide"
ccccaccctccagcacagcc

SEQ ID NO: 3261 - DNA, 20 bp, Artificial Sequence
  source: /note="Description of Artificial Sequence: Synthetic oligonucleotide"
gccccaccctccagcacagc

SEQ ID NO: 3262 - DNA, 20 bp, Artificial Sequence
  source: /note="Description of Artificial Sequence: Synthetic oligonucleotide"
agccccaccctccagcacag

SEQ ID NO: 3263 - DNA, 20 bp, Artificial Sequence
  source: /note="Description of Artificial Sequence: Synthetic oligonucleotide"
cagccccaccctccagcaca

SEQ ID NO: 3264 - DNA, 20 bp, Artificial Sequence
  source: /note="Description of Artificial Sequence: Synthetic oligonucleotide"
ccagccccaccctccagcac

SEQ ID NO: 3265 - DNA, 20 bp, Artificial Sequence
  source: /note="Description of Artificial Sequence: Synthetic oligonucleotide"
cccagccccaccctccagca

SEQ ID NO: 3266 - DNA, 20 bp, Artificial Sequence
  source: /note="Description of Artificial Sequence: Synthetic oligonucleotide"
accccagccccaccctccag

SEQ ID NO: 3267 - DNA, 20 bp, Artificial Sequence
  source: /note="Description of Artificial Sequence: Synthetic oligonucleotide"
caccccagccccaccctcca

SEQ ID NO: 3268 - DNA, 20 bp, Artificial Sequence
  source: /note="Description of Artificial Sequence: Synthetic oligonucleotide"
tgcaccccagccccaccctc

SEQ ID NO: 3269 - DNA, 20 bp, Artificial Sequence
  source: /note="Description of Artificial Sequence: Synthetic oligonucleotide"
atgcaccccagccccaccct

SEQ ID NO: 3270 - DNA, 20 bp, Artificial Sequence
  source: /note="Description of Artificial Sequence: Synthetic oligonucleotide"
catgcaccccagccccaccc

SEQ ID NO: 3271 - DNA, 20 bp, Artificial Sequence
  source: /note="Description of Artificial Sequence: Synthetic oligonucleotide"
ccatgcaccccagccccacc

SEQ ID NO: 3272 - DNA, 20 bp, Artificial Sequence
  source: /note="Description of Artificial Sequence: Synthetic oligonucleotide"
cccatgcaccccagccccac

SEQ ID NO: 3273 - DNA, 20 bp, Artificial Sequence
  source: /note="Description of Artificial Sequence: Synthetic oligonucleotide"
ccccatgcaccccagcccca

SEQ ID NO: 3274 - DNA, 20 bp, Artificial Sequence
  source: /note="Description of Artificial Sequence: Synthetic oligonucleotide"
tccccatgcaccccagcccc

SEQ ID NO: 3275 - DNA, 20 bp, Artificial Sequence
  source: /note="Description of Artificial Sequence: Synthetic oligonucleotide"
ctccccatgcaccccagccc

SEQ ID NO: 3276 - DNA, 20 bp, Artificial Sequence
  source: /note="Description of Artificial Sequence: Synthetic oligonucleotide"
cctccccatgcaccccagcc

SEQ ID NO: 3277 - DNA, 20 bp, Artificial Sequence
  source: /note="Description of Artificial Sequence: Synthetic oligonucleotide"
ccctccccatgcaccccagc

SEQ ID NO: 3278 - DNA, 20 bp, Artificial Sequence
  source: /note="Description of Artificial Sequence: Synthetic oligonucleotide"
cccctccccatgcaccccag

SEQ ID NO: 3279 - DNA, 20 bp, Artificial Sequence
  source: /note="Description of Artificial Sequence: Synthetic oligonucleotide"
tcccctccccatgcacccca

SEQ ID NO: 3280 - DNA, 20 bp, Artificial Sequence
  source: /note="Description of Artificial Sequence: Synthetic oligonucleotide"
ctcccctccccatgcacccc

SEQ ID NO: 3281 - DNA, 20 bp, Artificial Sequence
  source: /note="Description of Artificial Sequence: Synthetic oligonucleotide"
gctcccctccccatgcaccc

SEQ ID NO: 3282 - DNA, 20 bp, Artificial Sequence
  source: /note="Description of Artificial Sequence: Synthetic oligonucleotide"
tgctcccctccccatgcacc

SEQ ID NO: 3283 - DNA, 20 bp, Artificial Sequence
  source: /note="Description of Artificial Sequence: Synthetic oligonucleotide"
ctgctcccctccccatgcac

SEQ ID NO: 3284 - DNA, 20 bp, Artificial Sequence
  source: /note="Description of Artificial Sequence: Synthetic oligonucleotide"
tctgctcccctccccatgca

SEQ ID NO: 3285 - DNA, 20 bp, Artificial Sequence
  source: /note="Description of Artificial Sequence: Synthetic oligonucleotide"
ttctgctcccctccccatgc

SEQ ID NO: 3286 - DNA, 20 bp, Artificial Sequence
  source: /note="Description of Artificial Sequence: Synthetic oligonucleotide"
gttctgctcccctccccatg

SEQ ID NO: 3287 - DNA, 20 bp, Artificial Sequence
  source: /note="Description of Artificial Sequence: Synthetic oligonucleotide"
ggttctgctcccctccccat

SEQ ID NO: 3288 - DNA, 20 bp, Artificial Sequence
  source: /note="Description of Artificial Sequence: Synthetic oligonucleotide"
gggttctgctcccctcccca

SEQ ID NO: 3289 - DNA, 20 bp, Artificial Sequence
  source: /note="Description of Artificial Sequence: Synthetic oligonucleotide"
tgggttctgctcccctcccc

SEQ ID NO: 3290 - DNA, 20 bp, Artificial Sequence
  source: /note="Description of Artificial Sequence: Synthetic oligonucleotide"
ctgggttctgctcccctccc

SEQ ID NO: 3291 - DNA, 20 bp, Artificial Sequence
  source: /note="Description of Artificial Sequence: Synthetic oligonucleotide"
tctgggttctgctcccctcc

SEQ ID NO: 3292 - DNA, 20 bp, Artificial Sequence
  source: /note="Description of Artificial Sequence: Synthetic oligonucleotide"
ttctgggttctgctcccctc

SEQ ID NO: 3293 - DNA, 20 bp, Artificial Sequence
  source: /note="Description of Artificial Sequence: Synthetic oligonucleotide"
gttctgggttctgctcccct

SEQ ID NO: 3294 - DNA, 20 bp, Artificial Sequence
  source: /note="Description of Artificial Sequence: Synthetic oligonucleotide"
ggttctgggttctgctcccc

SEQ ID NO: 3295 - DNA, 20 bp, Artificial Sequence
  source: /note="Description of Artificial Sequence: Synthetic oligonucleotide"
gggttctgggttctgctccc

SEQ ID NO: 3296 - DNA, 20 bp, Artificial Sequence
  source: /note="Description of Artificial Sequence: Synthetic oligonucleotide"
tgggttctgggttctgctcc

SEQ ID NO: 3297 - DNA, 20 bp, Artificial Sequence
  source: /note="Description of Artificial Sequence: Synthetic oligonucleotide"
ctgggttctgggttctgctc

SEQ ID NO: 3298 - DNA, 20 bp, Artificial Sequence
  source: /note="Description of Artificial Sequence: Synthetic oligonucleotide"
cctgggttctgggttctgct

SEQ ID NO: 3299 - DNA, 20 bp, Artificial Sequence
  source: /note="Description of Artificial Sequence: Synthetic oligonucleotide"
tcctgggttctgggttctgc

SEQ ID NO: 3300 - DNA, 20 bp, Artificial Sequence
  source: /note="Description of Artificial Sequence: Synthetic oligonucleotide"
ctcctgggttctgggttctg

SEQ ID NO: 3301 - DNA, 20 bp, Artificial Sequence
  source: /note="Description of Artificial Sequence: Synthetic oligonucleotide"
gctcctgggttctgggttct

SEQ ID NO: 3302 - DNA, 20 bp, Artificial Sequence
  source: /note="Description of Artificial Sequence: Synthetic oligonucleotide"
ggctcctgggttctgggttc

SEQ ID NO: 3303 - DNA, 20 bp, Artificial Sequence
  source: /note="Description of Artificial Sequence: Synthetic oligonucleotide"
gggctcctgggttctgggtt

SEQ ID NO: 3304 - DNA, 20 bp, Artificial Sequence
  source: /note="Description of Artificial Sequence: Synthetic oligonucleotide"
ttgggtgtggcccacgcggg

SEQ ID NO: 3305 - DNA, 20 bp, Artificial Sequence
  source: /note="Description of Artificial Sequence: Synthetic oligonucleotide"
gttgggtgtggcccacgcgg

SEQ ID NO: 3306 - DNA, 20 bp, Artificial Sequence
  source: /note="Description of Artificial Sequence: Synthetic oligonucleotide"
agttgggtgtggcccacgcg

SEQ ID NO: 3307 - DNA, 20 bp, Artificial Sequence
  source: /note="Description of Artificial Sequence: Synthetic oligonucleotide"
gagttgggtgtggcccacgc

SEQ ID NO: 3308 - DNA, 20 bp, Artificial Sequence
  source: /note="Description of Artificial Sequence: Synthetic oligonucleotide"
tgagttgggtgtggcccacg

SEQ ID NO: 3309 - DNA, 20 bp, Artificial Sequence
  source: /note="Description of Artificial Sequence: Synthetic oligonucleotide"
ctgagttgggtgtggcccac

SEQ ID NO: 3310 - DNA, 20 bp, Artificial Sequence
  source: /note="Description of Artificial Sequence: Synthetic oligonucleotide"
ctctgagttgggtgtggccc

SEQ ID NO: 3311 - DNA, 20 bp, Artificial Sequence
  source: /note="Description of Artificial Sequence: Synthetic oligonucleotide"
gctctgagttgggtgtggcc

SEQ ID NO: 3312 - DNA, 20 bp, Artificial Sequence
  source: /note="Description of Artificial Sequence: Synthetic oligonucleotide"
ggctctgagttgggtgtggc

SEQ ID NO: 3313 - DNA, 20 bp, Artificial Sequence
  source: /note="Description of Artificial Sequence: Synthetic oligonucleotide"
cggctctgagttgggtgtgg

SEQ ID NO: 3314 - DNA, 20 bp, Artificial Sequence
  source: /note="Description of Artificial Sequence: Synthetic oligonucleotide"
ccggctctgagttgggtgtg

SEQ ID NO: 3315 - DNA, 20 bp, Artificial Sequence
  source: /note="Description of Artificial Sequence: Synthetic oligonucleotide"
gccgtgaacgctcaggccgg

SEQ ID NO: 3316 - DNA, 20 bp, Artificial Sequence
  source: /note="Description of Artificial Sequence: Synthetic oligonucleotide"
ggccgtgaacgctcaggccg

SEQ ID NO: 3317 - DNA, 20 bp, Artificial Sequence
  source: /note="Description of Artificial Sequence: Synthetic oligonucleotide"
tggccgtgaacgctcaggcc

SEQ ID NO: 3318 - DNA, 20 bp, Artificial Sequence
  source: /note="Description of Artificial Sequence: Synthetic oligonucleotide"
ctggccgtgaacgctcaggc

SEQ ID NO: 3319 - DNA, 20 bp, Artificial Sequence
  source: /note="Description of Artificial Sequence: Synthetic oligonucleotide"
cctggccgtgaacgctcagg

SEQ ID NO: 3320 - DNA, 20 bp, Artificial Sequence
  source: /note="Description of Artificial Sequence: Synthetic oligonucleotide"
gcctggccgtgaacgctcag

SEQ ID NO: 3321 - DNA, 20 bp, Artificial Sequence
  source: /note="Description of Artificial Sequence: Synthetic oligonucleotide"
tgcctggccgtgaacgctca

SEQ ID NO: 3322 - DNA, 20 bp, Artificial Sequence
  source: /note="Description of Artificial Sequence: Synthetic oligonucleotide"
ctgcctggccgtgaacgctc

SEQ ID NO: 3323 - DNA, 20 bp, Artificial Sequence
  source: /note="Description of Artificial Sequence: Synthetic oligonucleotide"
gctgcctggccgtgaacgct

SEQ ID NO: 3324 - DNA, 20 bp, Artificial Sequence
  source: /note="Description of Artificial Sequence: Synthetic oligonucleotide"
ggctgcctggccgtgaacgc

SEQ ID NO: 3325 - DNA, 20 bp, Artificial Sequence
  source: /note="Description of Artificial Sequence: Synthetic oligonucleotide"
aggctgcctggccgtgaacg

SEQ ID NO: 3326 - DNA, 20 bp, Artificial Sequence
  source: /note="Description of Artificial Sequence: Synthetic oligonucleotide"
gaggctgcctggccgtgaac

SEQ ID NO: 3327 - DNA, 20 bp, Artificial Sequence
  source: /note="Description of Artificial Sequence: Synthetic oligonucleotide"
cgaggctgcctggccgtgaa

SEQ ID NO: 3328 - DNA, 20 bp, Artificial Sequence
  source: /note="Description of Artificial Sequence: Synthetic oligonucleotide"
gcgaggctgcctggccgtga

SEQ ID NO: 3329 - DNA, 20 bp, Artificial Sequence
  source: /note="Description of Artificial Sequence: Synthetic oligonucleotide"
agcgaggctgcctggccgtg

SEQ ID NO: 3330 - DNA, 20 bp, Artificial Sequence
  source: /note="Description of Artificial Sequence: Synthetic oligonucleotide"
aagcgaggctgcctggccgt

SEQ ID NO: 3331 - DNA, 20 bp, Artificial Sequence
  source: /note="Description of Artificial Sequence: Synthetic oligonucleotide"
gaagcgaggctgcctggccg

SEQ ID NO: 3332 - DNA, 20 bp, Artificial Sequence
  source: /note="Description of Artificial Sequence: Synthetic oligonucleotide"
ggaagcgaggctgcctggcc

SEQ ID NO: 3333 - DNA, 20 bp, Artificial Sequence
  source: /note="Description of Artificial Sequence: Synthetic oligonucleotide"
aggaagcgaggctgcctggc

SEQ ID NO: 3334 - DNA, 20 bp, Artificial Sequence
  source: /note="Description of Artificial Sequence: Synthetic oligonucleotide"
aaggaagcgaggctgcctgg

SEQ ID NO: 3335 - DNA, 20 bp, Artificial Sequence
  source: /note="Description of Artificial Sequence: Synthetic oligonucleotide"
caaggaagcgaggctgcctg

SEQ ID NO: 3336 - DNA, 20 bp, Artificial Sequence
  source: /note="Description of Artificial Sequence: Synthetic oligonucleotide"
gcaaggaagcgaggctgcct

SEQ ID NO: 3337 - DNA, 20 bp, Artificial Sequence
  source: /note="Description of Artificial Sequence: Synthetic oligonucleotide"
tgcaaggaagcgaggctgcc

SEQ ID NO: 3338 - DNA, 20 bp, Artificial Sequence
  source: /note="Description of Artificial Sequence: Synthetic oligonucleotide"
ctgcaaggaagcgaggctgc

SEQ ID NO: 3339 - DNA, 20 bp, Artificial Sequence
  source: /note="Description of Artificial Sequence: Synthetic oligonucleotide"
gctgcaaggaagcgaggctg

SEQ ID NO: 3340 - DNA, 20 bp, Artificial Sequence
  source: /note="Description of Artificial Sequence: Synthetic oligonucleotide"
ggctgcaaggaagcgaggct

SEQ ID NO: 3341 - DNA, 20 bp, Artificial Sequence
  source: /note="Description of Artificial Sequence: Synthetic oligonucleotide"
tggctgcaaggaagcgaggc

SEQ ID NO: 3342 - DNA, 20 bp, Artificial Sequence
  source: /note="Description of Artificial Sequence: Synthetic oligonucleotide"
ttggctgcaaggaagcgagg

SEQ ID NO: 3343 - DNA, 20 bp, Artificial Sequence
  source: /note="Description of Artificial Sequence: Synthetic oligonucleotide"
cttggctgcaaggaagcgag

SEQ ID NO: 3344 - DNA, 20 bp, Artificial Sequence
  source: /note="Description of Artificial Sequence: Synthetic oligonucleotide"
ccttggctgcaaggaagcga

SEQ ID NO: 3345 - DNA, 20 bp, Artificial Sequence
  source: /note="Description of Artificial Sequence: Synthetic oligonucleotide"
cccttggctgcaaggaagcg

SEQ ID NO: 3346 - DNA, 20 bp, Artificial Sequence
  source: /note="Description of Artificial Sequence: Synthetic oligonucleotide"
gcccttggctgcaaggaagc

SEQ ID NO: 3347 - DNA, 20 bp, Artificial Sequence
  source: /note="Description of Artificial Sequence: Synthetic oligonucleotide"
agcccttggctgcaaggaag

SEQ ID NO: 3348 - DNA, 20 bp, Artificial Sequence
  source: /note="Description of Artificial Sequence: Synthetic oligonucleotide"
cagcccttggctgcaaggaa

SEQ ID NO: 3349 - DNA, 20 bp, Artificial Sequence
  source: /note="Description of Artificial Sequence: Synthetic oligonucleotide"
ccagcccttggctgcaagga

SEQ ID NO: 3350 - DNA, 20 bp, Artificial Sequence
  source: /note="Description of Artificial Sequence: Synthetic oligonucleotide"
cccagcccttggctgcaagg

SEQ ID NO: 3351 - DNA, 20 bp, Artificial Sequence
  source: /note="Description of Artificial Sequence: Synthetic oligonucleotide"
ccccagcccttggctgcaag

SEQ ID NO: 3352 - DNA, 20 bp, Artificial Sequence
  source: /note="Description of Artificial Sequence: Synthetic oligonucleotide"
cccccagcccttggctgcaa

SEQ ID NO: 3353 - DNA, 20 bp, Artificial Sequence
  source: /note="Description of Artificial Sequence: Synthetic oligonucleotide"
gcccccagcccttggctgca

SEQ ID NO: 3354 - DNA, 20 bp, Artificial Sequence
  source: /note="Description of Artificial Sequence: Synthetic oligonucleotide"
tggcccccagcccttggctg

SEQ ID NO: 3355 - DNA, 20 bp, Artificial Sequence
  source: /note="Description of Artificial Sequence: Synthetic oligonucleotide"
ctggcccccagcccttggct

SEQ ID NO: 3356 - DNA, 20 bp, Artificial Sequence
  source: /note="Description of Artificial Sequence: Synthetic oligonucleotide"
agccctggcccccagccctt

SEQ ID NO: 3357 - DNA, 20 bp, Artificial Sequence
  source: /note="Description of Artificial Sequence: Synthetic oligonucleotide"
acagcagccctggcccccag

SEQ ID NO: 3358 - DNA, 20 bp, Artificial Sequence
  source: /note="Description of Artificial Sequence: Synthetic oligonucleotide"
aacagcagccctggccccca

SEQ ID NO: 3359 - DNA, 20 bp, Artificial Sequence
  source: /note="Description of Artificial Sequence: Synthetic oligonucleotide"
gaacagcagccctggccccc

SEQ ID NO: 3360 - DNA, 20 bp, Artificial Sequence
  source: /note="Description of Artificial Sequence: Synthetic oligonucleotide"
agaacagcagccctggcccc

SEQ ID NO: 3361 - DNA, 20 bp, Artificial Sequence
  source: /note="Description of Artificial Sequence: Synthetic oligonucleotide"
cagaacagcagccctggccc

SEQ ID NO: 3362 - DNA, 20 bp, Artificial Sequence
  source: /note="Description of Artificial Sequence: Synthetic oligonucleotide"
gcagaacagcagccctggcc

SEQ ID NO: 3363 - DNA, 20 bp, Artificial Sequence
  source: /note="Description of Artificial Sequence: Synthetic oligonucleotide"
tgcagaacagcagccctggc

SEQ ID NO: 3364 - DNA, 20 bp, Artificial Sequence
  source: /note="Description of Artificial Sequence: Synthetic oligonucleotide"
gtgcagaacagcagccctgg

SEQ ID NO: 3365 - DNA, 20 bp, Artificial Sequence
  source: /note="Description of Artificial Sequence: Synthetic oligonucleotide"
agtgcagaacagcagccctg

SEQ ID NO: 3366 - DNA, 20 bp, Artificial Sequence
  source: /note="Description of Artificial Sequence: Synthetic oligonucleotide"
gagtgcagaacagcagccct

SEQ ID NO: 3367 - DNA, 20 bp, Artificial Sequence
  source: /note="Description of Artificial Sequence: Synthetic oligonucleotide"
agagtgcagaacagcagccc

SEQ ID NO: 3368 - DNA, 20 bp, Artificial Sequence
  source: /note="Description of Artificial Sequence: Synthetic oligonucleotide"
cagagtgcagaacagcagcc

SEQ ID NO: 3369 - DNA, 20 bp, Artificial Sequence
  source: /note="Description of Artificial Sequence: Synthetic oligonucleotide"
ccagagtgcagaacagcagc

SEQ ID NO: 3370 - DNA, 20 bp, Artificial Sequence
  source: /note="Description of Artificial Sequence: Synthetic oligonucleotide"
cccagagtgcagaacagcag

SEQ ID NO: 3371 - DNA, 20 bp, Artificial Sequence
  source: /note="Description of Artificial Sequence: Synthetic oligonucleotide"
ccccagagtgcagaacagca

SEQ ID NO: 3372 - DNA, 20 bp, Artificial Sequence
  source: /note="Description of Artificial Sequence: Synthetic oligonucleotide"
accccagagtgcagaacagc

SEQ ID NO: 3373 - DNA, 20 bp, Artificial Sequence
  source: /note="Description of Artificial Sequence: Synthetic oligonucleotide"
caccccagagtgcagaacag

SEQ ID NO: 3374 - DNA, 20 bp, Artificial Sequence
  source: /note="Description of Artificial Sequence: Synthetic oligonucleotide"
ccaccccagagtgcagaaca

SEQ ID NO: 3375 - DNA, 20 bp, Artificial Sequence
  source: /note="Description of Artificial Sequence: Synthetic oligonucleotide"
cccaccccagagtgcagaac

SEQ ID NO: 3376 - DNA, 20 bp, Artificial Sequence
  source: /note="Description of Artificial Sequence: Synthetic oligonucleotide"
acccaccccagagtgcagaa

SEQ ID NO: 3377 - DNA, 20 bp, Artificial Sequence
  source: /note="Description of Artificial Sequence: Synthetic oligonucleotide"
cacccaccccagagtgcaga

SEQ ID NO: 3378 - DNA, 20 bp, Artificial Sequence
  source: /note="Description of Artificial Sequence: Synthetic oligonucleotide"
tcacccaccccagagtgcag

SEQ ID NO: 3379 - DNA, 20 bp, Artificial Sequence
  source: /note="Description of Artificial Sequence: Synthetic oligonucleotide"
ctcacccaccccagagtgca

SEQ ID NO: 3380 - DNA, 20 bp, Artificial Sequence
  source: /note="Description of Artificial Sequence: Synthetic oligonucleotide"
cctcacccaccccagagtgc

SEQ ID NO: 3381 - DNA, 20 bp, Artificial Sequence
  source: /note="Description of Artificial Sequence: Synthetic oligonucleotide"
ccctcacccaccccagagtg

SEQ ID NO: 3382 - DNA, 20 bp, Artificial Sequence
  source: /note="Description of Artificial Sequence: Synthetic oligonucleotide"
cccctcacccaccccagagt

SEQ ID NO: 3383 - DNA, 20 bp, Artificial Sequence
  source: /note="Description of Artificial Sequence: Synthetic oligonucleotide"
ccccctcacccaccccagag

SEQ ID NO: 3384 - DNA, 20 bp, Artificial Sequence
  source: /note="Description of Artificial Sequence: Synthetic oligonucleotide"
tccccctcacccaccccaga

SEQ ID NO: 3385 - DNA, 20 bp, Artificial Sequence
  source: /note="Description of Artificial Sequence: Synthetic oligonucleotide"
cgggggtgggcgtagaactc

SEQ ID NO: 3386 - DNA, 20 bp, Artificial Sequence
  source: /note="Description of Artificial Sequence: Synthetic oligonucleotide"
ccgggggtgggcgtagaact

SEQ ID NO: 3387 - DNA, 20 bp, Artificial Sequence
  source: /note="Description of Artificial Sequence: Synthetic oligonucleotide"
ggggcgaagtccttcacggc

SEQ ID NO: 3388 - DNA, 20 bp, Artificial Sequence
  source: /note="Description of Artificial Sequence: Synthetic oligonucleotide"
gggggcgaagtccttcacgg

SEQ ID NO: 3389 - DNA, 20 bp, Artificial Sequence
  source: /note="Description of Artificial Sequence: Synthetic oligonucleotide"
tgggggcgaagtccttcacg

SEQ ID NO: 3390 - DNA, 20 bp, Artificial Sequence
  source: /note="Description of Artificial Sequence: Synthetic oligonucleotide"
ttgggggcgaagtccttcac

SEQ ID NO: 3391 - DNA, 20 bp, Artificial Sequence
  source: /note="Description of Artificial Sequence: Synthetic oligonucleotide"
ggcagttgggggcgaagtcc

SEQ ID NO: 3392 - DNA, 20 bp, Artificial Sequence
  source: /note="Description of Artificial Sequence: Synthetic oligonucleotide"
gggcagttgggggcgaagtc

SEQ ID NO: 3393 - DNA, 20 bp, Artificial Sequence
  source: /note="Description of Artificial Sequence: Synthetic oligonucleotide"
aggatctggacgtagagggg

SEQ ID NO: 3394 - DNA, 20 bp, Artificial Sequence
  source: /note="Description of Artificial Sequence: Synthetic oligonucleotide"
gtagtagaccatggggaagc

SEQ ID NO: 3395 - DNA, 20 bp, Artificial Sequence
  source: /note="Description of Artificial Sequence: Synthetic oligonucleotide"
cggccgtacgtgcggatcca

SEQ ID NO: 3396 - DNA, 20 bp, Artificial Sequence
  source: /note="Description of Artificial Sequence: Synthetic oligonucleotide"
gcggccgtacgtgcggatcc

SEQ ID NO: 3397 - DNA, 20 bp, Artificial Sequence
  source: /note="Description of Artificial Sequence: Synthetic oligonucleotide"
ggcggccgtacgtgcggatc

SEQ ID NO: 3398 - DNA, 20 bp, Artificial Sequence
  source: /note="Description of Artificial Sequence: Synthetic oligonucleotide"
aggcggccgtacgtgcggat

SEQ ID NO: 3399 - DNA, 20 bp, Artificial Sequence
  source: /note="Description of Artificial Sequence: Synthetic oligonucleotide"
gaggcggccgtacgtgcgga

SEQ ID NO: 3400 - DNA, 20 bp, Artificial Sequence
  source: /note="Description of Artificial Sequence: Synthetic oligonucleotide"
agaggcggccgtacgtgcgg

SEQ ID NO: 3401 - DNA, 20 bp, Artificial Sequence
  source: /note="Description of Artificial Sequence: Synthetic oligonucleotide"
aagaggcggccgtacgtgcg

SEQ ID NO: 3402 - DNA, 20 bp, Artificial Sequence
  source: /note="Description of Artificial Sequence: Synthetic oligonucleotide"
ccaatggggatctcggcgct

SEQ ID NO: 3403 - DNA, 20 bp, Artificial Sequence
  source: /note="Description of Artificial Sequence: Synthetic oligonucleotide"
gccaatggggatctcggcgc

SEQ ID NO: 3404 - DNA, 20 bp, Artificial Sequence
  source: /note="Description of Artificial Sequence: Synthetic oligonucleotide"
tgccaatggggatctcggcg

SEQ ID NO: 3405 - DNA, 20 bp, Artificial Sequence
  source: /note="Description of Artificial Sequence: Synthetic oligonucleotide"
atgccaatggggatctcggc

SEQ ID NO: 3406 - DNA, 20 bp, Artificial Sequence
  source: /note="Description of Artificial Sequence: Synthetic oligonucleotide"
gatgccaatggggatctcgg

SEQ ID NO: 3407 - DNA, 20 bp, Artificial Sequence
  source: /note="Description of Artificial Sequence: Synthetic oligonucleotide"
tccggtagatgccaatgggg

SEQ ID NO: 3408 - DNA, 20 bp, Artificial Sequence
  source: /note="Description of Artificial Sequence: Synthetic oligonucleotide"
ggggtcggagcggatgagat

SEQ ID NO: 3409 - DNA, 20 bp, Artificial Sequence
  source: /note="Description of Artificial Sequence: Synthetic oligonucleotide"
gggggtcggagcggatgaga

SEQ ID NO: 3410 - DNA, 20 bp, Artificial Sequence
  source: /note="Description of Artificial Sequence: Synthetic oligonucleotide"
tgatgaagaacagcttgagc

SEQ ID NO: 3411 - DNA, 20 bp, Artificial Sequence
  source: /note="Description of Artificial Sequence: Synthetic oligonucleotide"
gttgcctttgtagctgaggt

SEQ ID NO: 3412 - DNA, 20 bp, Artificial Sequence
  source: /note="Description of Artificial Sequence: Synthetic oligonucleotide"
gggatgaacaggttccgcag

SEQ ID NO: 3413 - DNA, 20 bp, Artificial Sequence
  source: /note="Description of Artificial Sequence: Synthetic oligonucleotide"
aggatggcacggtggaagtc

SEQ ID NO: 3414 - DNA, 20 bp, Artificial Sequence
  source: /note="Description of Artificial Sequence: Synthetic oligonucleotide"
gcagaagtagaaggaggtca

SEQ ID NO: 3415 - DNA, 20 bp, Artificial Sequence
  source: /note="Description of Artificial Sequence: Synthetic oligonucleotide"
tagatgacccgctgggacca

SEQ ID NO: 3416 - DNA, 20 bp, Artificial Sequence
  source: /note="Description of Artificial Sequence: Synthetic oligonucleotide"
gccgggcagatgcagttcag

SEQ ID NO: 3417 - DNA, 20 bp, Artificial Sequence
  source: /note="Description of Artificial Sequence: Synthetic oligonucleotide"
gagccagagagtagctgtcc

SEQ ID NO: 3418 - DNA, 20 bp, Artificial Sequence
  source: /note="Description of Artificial Sequence: Synthetic oligonucleotide"
tcacgaaggactggtagagc

SEQ ID NO: 3419 - DNA, 20 bp, Artificial Sequence
  source: /note="Description of Artificial Sequence: Synthetic oligonucleotide"
atggggatctcggcgctgga

SEQ ID NO: 3420 - DNA, 20 bp, Artificial Sequence
  source: /note="Description of Artificial Sequence: Synthetic oligonucleotide"
gttgcctttgtagctgaggt

SEQ ID NO: 3421 - DNA, 20 bp, Artificial Sequence
  source: /note="Description of Artificial Sequence: Synthetic oligonucleotide"
cagatgttgcctttgtagct

SEQ ID NO: 3422 - DNA, 20 bp, Artificial Sequence
  source: /note="Description of Artificial Sequence: Synthetic oligonucleotide"
tagatgacccgctgggacca

SEQ ID NO: 3423 - DNA, 20 bp, Artificial Sequence
  source: /note="Description of Artificial Sequence: Synthetic oligonucleotide"
ggtagatgacccgctgggac

SEQ ID NO: 3424 - DNA, 20 bp, Artificial Sequence
  source: /note="Description of Artificial Sequence: Synthetic oligonucleotide"
ggaggtagatgacccgctgg

SEQ ID NO: 3425 - DNA, 20 bp, Artificial Sequence
  source: /note="Description of Artificial Sequence: Synthetic oligonucleotide"
ctggaggtagatgacccgct

SEQ ID NO: 3426 - DNA, 20 bp, Artificial Sequence
  source: /note="Description of Artificial Sequence: Synthetic oligonucleotide"
atgtggtacacctcgttgcc

SEQ ID NO: 3427 - DNA, 20 bp, Artificial Sequence
  source: /note="Description of Artificial Sequence: Synthetic oligonucleotide"
tgcggatgtggtacacctcg

SEQ ID NO: 3428 - DNA, 20 bp, Artificial Sequence
  source: /note="Description of Artificial Sequence: Synthetic oligonucleotide"
cccatgcggatgtggtacac

SEQ ID NO: 3429 - DNA, 20 bp, Artificial Sequence
  source: /note="Description of Artificial Sequence: Synthetic oligonucleotide"
agctcttgccctcgtactcg

SEQ ID NO: 3430 - DNA, 20 bp, Artificial Sequence
  source: /note="Description of Artificial Sequence: Synthetic oligonucleotide"
aggtgaagctcttgccctcg

SEQ ID NO: 3431 - DNA, 20 bp, Artificial Sequence
  source: /note="Description of Artificial Sequence: Synthetic oligonucleotide"
gcgtaggtgaagctcttgcc

SEQ ID NO: 3432 - DNA, 20 bp, Artificial Sequence
  source: /note="Description of Artificial Sequence: Synthetic oligonucleotide"
ggccgcgtaggtgaagctct

SEQ ID NO: 3433 - DNA, 20 bp, Artificial Sequence
  source: /note="Description of Artificial Sequence: Synthetic oligonucleotide"
aaggccgcgtaggtgaagct

SEQ ID NO: 3434 - DNA, 20 bp, Artificial Sequence
  source: /note="Description of Artificial Sequence: Synthetic oligonucleotide"
gatccacaggtcgccctcgg

SEQ ID NO: 3435 - DNA, 20 bp, Artificial Sequence
  source: /note="Description of Artificial Sequence: Synthetic oligonucleotide"
cggatccacaggtcgccctc

SEQ ID NO: 3436 - DNA, 20 bp, Artificial Sequence
  source: /note="Description of Artificial Sequence: Synthetic oligonucleotide"
ggccgtacgtgcggatccac

SEQ ID NO: 3437 - DNA, 20 bp, Artificial Sequence
  source: /note="Description of Artificial Sequence: Synthetic oligonucleotide"
gcggccgtacgtgcggatcc

SEQ ID NO: 3438 - DNA, 20 bp, Artificial Sequence
  source: /note="Description of Artificial Sequence: Synthetic oligonucleotide"
atctcggcgctggaggagca

SEQ ID NO: 3439 - DNA, 20 bp, Artificial Sequence
  source: /note="Description of Artificial Sequence: Synthetic oligonucleotide"
ccaatggggatctcggcgct

SEQ ID NO: 3440 - DNA, 20 bp, Artificial Sequence
  source: /note="Description of Artificial Sequence: Synthetic oligonucleotide"
gaagaggcggccgtacgtgc

SEQ ID NO: 3441 - DNA, 20 bp, Artificial Sequence
  source: /note="Description of Artificial Sequence: Synthetic oligonucleotide"
ggaagaggcggccgtacgtg

SEQ ID NO: 3442 - DNA, 20 bp, Artificial Sequence
  source: /note="Description of Artificial Sequence: Synthetic oligonucleotide"
tggaagaggcggccgtacgt

SEQ ID NO: 3443 - DNA, 20 bp, Artificial Sequence
  source: /note="Description of Artificial Sequence: Synthetic oligonucleotide"
ctggaagaggcggccgtacg

SEQ ID NO: 3444 - DNA, 20 bp, Artificial Sequence
  source: /note="Description of Artificial Sequence: Synthetic oligonucleotide"
tctggaagaggcggccgtac

SEQ ID NO: 3445 - DNA, 20 bp, Artificial Sequence
  source: /note="Description of Artificial Sequence: Synthetic oligonucleotide"
ttctggaagaggcggccgta

SEQ ID NO: 3446 - DNA, 20 bp, Artificial Sequence
  source: /note="Description of Artificial Sequence: Synthetic oligonucleotide"
cttctggaagaggcggccgt

SEQ ID NO: 3447 - DNA, 20 bp, Artificial Sequence
  source: /note="Description of Artificial Sequence: Synthetic oligonucleotide"
gcttctggaagaggcggccg

SEQ ID NO: 3448 - DNA, 20 bp, Artificial Sequence
  source: /note="Description of Artificial Sequence: Synthetic oligonucleotide"
ggggatctcggcgctggagg

SEQ ID NO: 3449 - DNA, 20 bp, Artificial Sequence
  source: /note="Description of Artificial Sequence: Synthetic oligonucleotide"
tggggatctcggcgctggag

SEQ ID NO: 3450 - DNA, 20 bp, Artificial Sequence
  source: /note="Description of Artificial Sequence: Synthetic oligonucleotide"
aatggggatctcggcgctgg

SEQ ID NO: 3451 - DNA, 20 bp, Artificial Sequence
  source: /note="Description of Artificial Sequence: Synthetic oligonucleotide"
caatggggatctcggcgctg

SEQ ID NO: 3452 - DNA, 22 bp, Artificial Sequence
  source: /note="Description of Artificial Sequence: Synthetic oligonucleotide"
atgttgcctttgtagctgaggt

SEQ ID NO: 3453 - DNA, 22 bp, Artificial Sequence
  source: /note="Description of Artificial Sequence: Synthetic oligonucleotide"
cccagatgttgcctttgtagct

SEQ ID NO: 3454 - DNA, 22 bp, Artificial Sequence
  source: /note="Description of Artificial Sequence: Synthetic oligonucleotide"
ggtagatgacccgctgggacca

SEQ ID NO: 3455 - DNA, 22 bp, Artificial Sequence
  source: /note="Description of Artificial Sequence: Synthetic oligonucleotide"
gaggtagatgacccgctgggac

SEQ ID NO: 3456 - DNA, 22 bp, Artificial Sequence
  source: /note="Description of Artificial Sequence: Synthetic oligonucleotide"
ctggaggtagatgacccgctgg

SEQ ID NO: 3457 - DNA, 22 bp, Artificial Sequence
  source: /note="Description of Artificial Sequence: Synthetic oligonucleotide"
ccctggaggtagatgacccgct

SEQ ID NO: 3458 - DNA, 22 bp, Artificial Sequence
  source: /note="Description of Artificial Sequence: Synthetic oligonucleotide"
ggatgtggtacacctcgttgcc

SEQ ID NO: 3459 - DNA, 22 bp, Artificial Sequence
  source: /note="Description of Artificial Sequence: Synthetic oligonucleotide"
catgcggatgtggtacacctcg

SEQ ID NO: 3460 - DNA, 22 bp, Artificial Sequence
  source: /note="Description of Artificial Sequence: Synthetic oligonucleotide"
cacccatgcggatgtggtacac

SEQ ID NO: 3461 - DNA, 22 bp, Artificial Sequence
  source: /note="Description of Artificial Sequence: Synthetic oligonucleotide"
gaagctcttgccctcgtactcg

SEQ ID NO: 3462 - DNA, 22 bp, Artificial Sequence
  source: /note="Description of Artificial Sequence: Synthetic oligonucleotide"
gtaggtgaagctcttgccctcg

SEQ ID NO: 3463 - DNA, 22 bp, Artificial Sequence
  source: /note="Description of Artificial Sequence: Synthetic oligonucleotide"
ccgcgtaggtgaagctcttgcc

SEQ ID NO: 3464 - DNA, 22 bp, Artificial Sequence
  source: /note="Description of Artificial Sequence: Synthetic oligonucleotide"
aaggccgcgtaggtgaagctct

SEQ ID NO: 3465 - DNA, 22 bp, Artificial Sequence
  source: /note="Description of Artificial Sequence: Synthetic oligonucleotide"
ggaaggccgcgtaggtgaagct

SEQ ID NO: 3466 - DNA, 22 bp, Artificial Sequence
  source: /note="Description of Artificial Sequence: Synthetic oligonucleotide"
cggatccacaggtcgccctcgg

SEQ ID NO: 3467 - DNA, 22 bp, Artificial Sequence
  source: /note="Description of Artificial Sequence: Synthetic oligonucleotide"
tgcggatccacaggtcgccctc

SEQ ID NO: 3468 - DNA, 22 bp, Artificial Sequence
  source: /note="Description of Artificial Sequence: Synthetic oligonucleotide"
gcggccgtacgtgcggatccac

SEQ ID NO: 3469 - DNA, 22 bp, Artificial Sequence
  source: /note="Description of Artificial Sequence: Synthetic oligonucleotide"
aggcggccgtacgtgcggatcc

SEQ ID NO: 3470 - DNA, 22 bp, Artificial Sequence
  source: /note="Description of Artificial Sequence: Synthetic oligonucleotide"
ggatctcggcgctggaggagca

SEQ ID NO: 3471 - DNA, 22 bp, Artificial Sequence
  source: /note="Description of Artificial Sequence: Synthetic oligonucleotide"
tgccaatggggatctcggcgct

SEQ ID NO: 3472 - DNA, 18 bp, Artificial Sequence
  source: /note="Description of Artificial Sequence: Synthetic oligonucleotide"
gttgcctttgtagctgag

SEQ ID NO: 3473 - DNA, 18 bp, Artificial Sequence
  source: /note="Description of Artificial Sequence: Synthetic oligonucleotide"
cagatgttgcctttgtag

SEQ ID NO: 3474 - DNA, 18 bp, Artificial Sequence
  source: /note="Description of Artificial Sequence: Synthetic oligonucleotide"
tagatgacccgctgggac

SEQ ID NO: 3475 - DNA, 18 bp, Artificial Sequence
  source: /note="Description of Artificial Sequence: Synthetic oligonucleotide"
ggtagatgacccgctggg

SEQ ID NO: 3476 - DNA, 18 bp, Artificial Sequence
  source: /note="Description of Artificial Sequence: Synthetic oligonucleotide"
ggaggtagatgacccgct

SEQ ID NO: 3477 - DNA, 18 bp, Artificial Sequence
  source: /note="Description of Artificial Sequence: Synthetic oligonucleotide"
ctggaggtagatgacccg

SEQ ID NO: 3478 - DNA, 18 bp, Artificial Sequence
  source: /note="Description of Artificial Sequence: Synthetic oligonucleotide"
atgtggtacacctcgttg

SEQ ID NO: 3479 - DNA, 18 bp, Artificial Sequence
  source: /note="Description of Artificial Sequence: Synthetic oligonucleotide"
tgcggatgtggtacacct

SEQ ID NO: 3480 - DNA, 18 bp, Artificial Sequence
  source: /note="Description of Artificial Sequence: Synthetic oligonucleotide"
cccatgcggatgtggtac

SEQ ID NO: 3481 - DNA, 18 bp, Artificial Sequence
  source: /note="Description of Artificial Sequence: Synthetic oligonucleotide"
agctcttgccctcgtact

SEQ ID NO: 3482 - DNA, 18 bp, Artificial Sequence
  source: /note="Description of Artificial Sequence: Synthetic oligonucleotide"
aggtgaagctcttgccct

SEQ ID NO: 3483 - DNA, 18 bp, Artificial Sequence
  source: /note="Description of Artificial Sequence: Synthetic oligonucleotide"
gcgtaggtgaagctcttg

SEQ ID NO: 3484 - DNA, 18 bp, Artificial Sequence
  source: /note="Description of Artificial Sequence: Synthetic oligonucleotide"
ggccgcgtaggtgaagct

SEQ ID NO: 3485 - DNA, 18 bp, Artificial Sequence
  source: /note="Description of Artificial Sequence: Synthetic oligonucleotide"
aaggccgcgtaggtgaag

SEQ ID NO: 3486 - DNA, 18 bp, Artificial Sequence
  source: /note="Description of Artificial Sequence: Synthetic oligonucleotide"
gatccacaggtcgccctc

SEQ ID NO: 3487 - DNA, 18 bp, Artificial Sequence
  source: /note="Description of Artificial Sequence: Synthetic oligonucleotide"
cggatccacaggtcgccc

SEQ ID NO: 3488 - DNA, 18 bp, Artificial Sequence
  source: /note="Description of Artificial Sequence: Synthetic oligonucleotide"
ggccgtacgtgcggatcc

SEQ ID NO: 3489 - DNA, 18 bp, Artificial Sequence
  source: /note="Description of Artificial Sequence: Synthetic oligonucleotide"
gcggccgtacgtgcggat

SEQ ID NO: 3490 - DNA, 18 bp, Artificial Sequence
  source: /note="Description of Artificial Sequence: Synthetic oligonucleotide"
atctcggcgctggaggag

SEQ ID NO: 3491 - DNA, 18 bp, Artificial Sequence
  source: /note="Description of Artificial Sequence: Synthetic oligonucleotide"
ccaatggggatctcggcg

SEQ ID NO: 3492 - DNA, 17 bp, Artificial Sequence
  source: /note="Description of Artificial Sequence: Synthetic oligonucleotide"
gttgcctttgtagctga

SEQ ID NO: 3493 - DNA, 17 bp, Artificial Sequence
  source: /note="Description of Artificial Sequence: Synthetic oligonucleotide"
cagatgttgcctttgta

SEQ ID NO: 3494 - DNA, 17 bp, Artificial Sequence
  source: /note="Description of Artificial Sequence: Synthetic oligonucleotide"
tagatgacccgctggga

SEQ ID NO: 3495 - DNA, 17 bp, Artificial Sequence
  source: /note="Description of Artificial Sequence: Synthetic oligonucleotide"
ggtagatgacccgctgg

SEQ ID NO: 3496 - DNA, 17 bp, Artificial Sequence
  source: /note="Description of Artificial Sequence: Synthetic oligonucleotide"
ggaggtagatgacccgc

SEQ ID NO: 3497 - DNA, 17 bp, Artificial Sequence
  source: /note="Description of Artificial Sequence: Synthetic oligonucleotide"
ctggaggtagatgaccc

SEQ ID NO: 3498 - DNA, 17 bp, Artificial Sequence
  source: /note="Description of Artificial Sequence: Synthetic oligonucleotide"
atgtggtacacctcgtt

SEQ ID NO: 3499 - DNA, 17 bp, Artificial Sequence
  source: /note="Description of Artificial Sequence: Synthetic oligonucleotide"
tgcggatgtggtacacc

SEQ ID NO: 3500 - DNA, 17 bp, Artificial Sequence
  source: /note="Description of Artificial Sequence: Synthetic oligonucleotide"
cccatgcggatgtggta

SEQ ID NO: 3501 - DNA, 17 bp, Artificial Sequence
  source: /note="Description of Artificial Sequence: Synthetic oligonucleotide"
agctcttgccctcgtac

SEQ ID NO: 3502 - DNA, 17 bp, Artificial Sequence
  source: /note="Description of Artificial Sequence: Synthetic oligonucleotide"
aggtgaagctcttgccc

SEQ ID NO: 3503 - DNA, 17 bp, Artificial Sequence
  source: /note="Description of Artificial Sequence: Synthetic oligonucleotide"
gcgtaggtgaagctctt

SEQ ID NO: 3504 - DNA, 17 bp, Artificial Sequence
  source: /note="Description of Artificial Sequence: Synthetic oligonucleotide"
ggccgcgtaggtgaagc

SEQ ID NO: 3505 - DNA, 17 bp, Artificial Sequence
  source: /note="Description of Artificial Sequence: Synthetic oligonucleotide"
aaggccgcgtaggtgaa

SEQ ID NO: 3506 - DNA, 17 bp, Artificial Sequence
  source: /note="Description of Artificial Sequence: Synthetic oligonucleotide"
gatccacaggtcgccct

SEQ ID NO: 3507 - DNA, 17 bp, Artificial Sequence
  source: /note="Description of Artificial Sequence: Synthetic oligonucleotide"
cggatccacaggtcgcc

SEQ ID NO: 3508 - DNA, 17 bp, Artificial Sequence
  source: /note="Description of Artificial Sequence: Synthetic oligonucleotide"
ggccgtacgtgcggatc

SEQ ID NO: 3509 - DNA, 17 bp, Artificial Sequence
  source: /note="Description of Artificial Sequence: Synthetic oligonucleotide"
gcggccgtacgtgcgga

SEQ ID NO: 3510 - DNA, 17 bp, Artificial Sequence
  source: /note="Description of Artificial Sequence: Synthetic oligonucleotide"
atctcggcgctggagga

SEQ ID NO: 3511 - DNA, 17 bp, Artificial Sequence
  source: /note="Description of Artificial Sequence: Synthetic oligonucleotide"
ccaatggggatctcggc

SEQ ID NO: 3512 - DNA, 20 bp, Artificial Sequence
  source: /note="Description of Artificial Sequence: Synthetic oligonucleotide"
gttggcttagtacctgtggt

SEQ ID NO: 3513 - DNA, 20 bp, Artificial Sequence
  source: /note="Description of Artificial Sequence: Synthetic oligonucleotide"
ctttggttgcgaggttagct

SEQ ID NO: 3514 - DNA, 20 bp, Artificial Sequence
  source: /note="Description of Artificial Sequence: Synthetic oligonucleotide"
gcaggagtggaaagagatca

SEQ ID NO: 3515 - DNA, 20 bp, Artificial Sequence
  source: /note="Description of Artificial Sequence: Synthetic oligonucleotide"
agtaggcagaggtcaaagga

SEQ ID NO: 3516 - DNA, 20 bp, Artificial Sequence
  source: /note="Description of Artificial Sequence: Synthetic oligonucleotide"
gttggcttagtacctgtggt

SEQ ID NO: 3517 - DNA, 20 bp, Artificial Sequence
  source: /note="Description of Artificial Sequence: Synthetic oligonucleotide"
ggtacatgtccccctgcgac

SEQ ID NO: 3518 - DNA, 20 bp, Artificial Sequence
  source: /note="Description of Artificial Sequence: Synthetic oligonucleotide"
ggagctagttgagccggtgg

SEQ ID NO: 3519 - DNA, 20 bp, Artificial Sequence
  source: /note="Description of Artificial Sequence: Synthetic oligonucleotide"
atgtcgtagaccacgtagcc

SEQ ID NO: 3520 - DNA, 20 bp, Artificial Sequence
  source: /note="Description of Artificial Sequence: Synthetic oligonucleotide"
cccaagcgcatgaggttcac

SEQ ID NO: 3521 - DNA, 20 bp, Artificial Sequence
  source: /note="Description of Artificial Sequence: Synthetic oligonucleotide"
gcgttggtcaaggtctagcc

SEQ ID NO: 3522 - DNA, 20 bp, Artificial Sequence
  source: /note="Description of Artificial Sequence: Synthetic oligonucleotide"
ggccccgttggtcaaggtct

SEQ ID NO: 3523 - DNA, 20 bp, Artificial Sequence
  source: /note="Description of Artificial Sequence: Synthetic oligonucleotide"
gcgggcgttcgtccggttcc

SEQ ID NO: 3524 - DNA, 20 bp, Artificial Sequence
  source: /note="Description of Artificial Sequence: Synthetic oligonucleotide"
atctgggccctgcaggtgca

SEQ ID NO: 3525 - DNA, 20 bp, Artificial Sequence
  source: /note="Description of Artificial Sequence: Synthetic oligonucleotide"
ccaaagggcatcacggggct

SEQ ID NO: 3526 - DNA, 4782 bp, Homo sapiens
agggcaacgcgagggaagaaggtggcggctcccactcgcttctccctcgggtcgggtccgagctgccaggccgcatgccactccctgacggggcgcggaccccggggggcgtctgccgggaggcgcgcggcgggggctacaccaaccggaccttcgagtttgacgacggccaatgcgcccccaggcggccctgcgcgggggacggcgcgctcctggacaccgccggcttcaagatgagcgacctggactccgaggtgctgcccttgccgccgcgctaccgcttccgggacctgctgctgggcgacccgtccttccagaacgacgacagggtccaggtggagttctacgtcaacgagaacaccttcaaggagcggctcaagctgttcttcatcaaaaaccaaagatcgagcctgaggatccggctgttcaacttctccctgaagctgctcacctgcctgctctacattgtgcgcgtcctgctcgatgacccggccctgggcatcggatgctggggctgcccaaagcagaactactccttcaatgactcgtcctccgagatcaactgggctcctattctgtgggtggagagaaagatgacactgtgggcgatccaggtcatcgtggccataataagcttcctggagacgatgcttctcatctacctcagctacaaaggcaacatctgggagcagatcttccgcgtgtccttcgtcctggagatgatcaacactctgcccttcatcatcacgatcttctggccgccgctgcggaacctgttcatccccgtctttctgaactgctggctggccaagcacgcgctggaaaacatgattaatgacttccaccgtgccatcctgcggacacagtcagccatgttcaaccaggtcctcatcctcttctgcaccctgctgtgcctcgttttcacggggacctgcggcatccagcacctggagcgggcgggcgagaacctgtccctcctgacctccttctacttctgcatcgtcaccttctccaccgtgggctacggtgacgtcacgcccaagatctggccatcgcagctgctggtggtcatcatgatctgcgtggccctcgtggtgctcccactgcagttcgaggagctcgtctacctctggatggagcggcagaagtcagggggcaactacagccgccaccgtgcgcagacggagaagcacgtggtcctgtgtgtcagctccctcaagatcgaccttctcatggacttcctgaacgagttctacgcccacccccggctccaggactattacgtggtcatcctgtgccccacggagatggatgtccaggtgcgcagagtcctgcagatccctctgtggtcccagcgggtcatctacctccagggctctgcactcaaagaccaggacctcatgcgagccaagatggacaatggggaggcctgcttcatcctcagcagcaggaacgaggtggaccgcacggctgcagaccaccagaccatcctgcgcgcctgggccgtgaaggacttcgcccccaactgccccctctacgtccagatcctcaaacctgaaaacaagtttcacgtcaagtttgctgaccacgtggtgtgtgaggaggagtgcaagtacgccatgctggcgctgaactgcatctgcccggcgacctccaccctcatcaccctgctggtgcacacgtcccgcggccaggagggacaggagtctccggagcagtggcagcgcatgtatgggcgctgctccggcaacgaggtgtaccacatccgcatgggtgacagcaagttcttccgcgagtacgagggcaagagcttcacctacgcggccttccacgcccacaagaagtatggcgtgtgcctcatcgggctgaagcgggaggacaacaagagcatcctgctgaacccggggccccggcacatcctggccgcctctgacacctgcttctacatcaacatcaccaaggaggagaactcggccttcatcttcaagcaggaggagaagcggaagaagagggccttctcggggcaggggctgcacgagggtccggcccgcctgcccgtgcacagcatcatcgcctccatggggacagtggccatggacctgcagggcacagagcaccggcctacgcagagcggcggtgggggcgggggcagcaagctggcactgcccacggagaacggctcgggcagccggcggcccagcatcgcgcccgtcctggaactggccgacagctcagccctgctgccctgcgacctgctgagcgaccagtcggaggatgaggtgacgccgtcggacgacgaggggctctccgtggtagagtatgtgaagggctaccctcccaactcgccctacatcggcagctccccaaccctgtgccacctcctgcctgtgaaagcccccttctgctgcctgcggctggacaagggctgcaagcacaacagctatgaagacgccaaggcctacgggttcaagaacaagctgatcatcgtctcggcagagacggccggcaatgggctgtacaacttcatcgtgccactgcgggcctactacagatcccgcaaggagctgaaccccatcgtgctgctgctggacaacaagcccgaccaccacttcctggaagccatctgctgcttccccatggtctactacatggagggctctgtggacaacctggacagcctgctgcagtgtggcatcatctatgcggacaacctggtggtggtggacaaggagagcaccatgagcgccgaggaggactacatggcggacgccaagaccatcgtcaacgtgcagaccatgttccggctcttccccagcctcagcatcaccacggagctcacccacccttccaacatgcgcttcatgcagttccgcgccaaggacagctactctctggctctttccaaactagaaaagagggagcgagagaatggctccaacctggccttcatgttccgcctgccgttcgccgccggccgcgtcttcagcatcagcatgttggacacactgctctaccagtccttcgtgaaggactacatgatcaccatcacccggctgctgctgggcctggacaccacgccgggctcggggtacctctgtgccatgaaaatcaccgagggcgacctgtggatccgcacgtacggccgcctcttccagaagctctgctcctccagcgccgagatccccattggcatctaccggacagagagccacgtcttctccacctcggagccccacgacctcagagcccagtcccagatctcggtgaacgtggaggactgtgaggacacacgggaagtgaaggggccctggggctcccgcgctggcaccggaggcagctcccagggccgccacacgggcggcggtgaccccgcagagcacccactgctacggcgcaagagcctgcagtgggcccggaggctgagccgcaaggcgcccaagcaggcaggccgggcggcggccgcggagtggatcagccagcagcgcctcagcctgtaccggcgctctgagcgccaggagctctccgagctggtgaagaaccgcatgaagcacctggggctgcccaccaccggctacgacgagatgaacgaccaccagaacaccctctcctacgtcctcatcaaccctccgcccgacacgaggctggagcccagtgacattgtctatctcatccgctccgaccccctggctcacgtggccagcagctcccagagccggaagagcagctgcagccacaagctgtcgtcctgcaaccccgagactcgcgacgagacacagctctgagccagccctgcacggagctcaggccaccaagcccggggtcctcaggaaggacgtggaggagcgtgtgaggacacggtggcactagcgtgaccctggggatggcacactctactcaccatggctcctgggactccaccctggaaaggagcccctcatgcggggggagggccagctcacccctgggcacctgcaggctagtgaggagagttttttaacctatttttacacgtcgatgcagtccacttctctttacacagatgtaccgcaactcgtgaccagggctggctgggagggcaacgcagggactggacgccctacagggccgagcccaggctgtgctggagggtggggctggggtgcatggggaggggagcagaacccagaacccaggagccccgcgtgggccacacccaactcagagccggcctgagcgttcacggccaggcagcctcgcttccttgcagccaagggctgggggccagggctgctgttctgcactctggggtgggtgagggggaccctgggctgtttgctgtcccaagccccttctggaagttagaagcagcaaagggcccggggaagccgggcatgtgagaggggtgcgtccccaggtcccccagagggccctgtcgccgaggacctttctgaaggaagcagaagacgccatttcctctacttcacactgaactgtcccagccactgcatctagggggcattgggcggaagatggtgcatttccatggaccattttacacttaccttttaaagcaaagcctcattttctaaacccctgacttgtgaagcacaattcagcctccgggctgggccacgtggagagagaggatcttctcagcaaggcgagatcccgggcggcggctgacatcaggagcgccaccctgcgtcctttgctgctggttccttactggtttgtacggtcagcgctggaaacttctattaaatggatgcattctggaggcatgaagttaaaaaaaaaaaaaaa

SEQ ID NO: 3527 - protein, 1235 aa, Homo sapiens
MPLPDGARTPGGVCREARGGGYTNRTFEFDDGQCAPRRPCAGDGALLDTAGFKMSDLDSEVLPLPPRYRFRDLLLGDPSFQNDDRVQVEFYVNENTFKERLKLFFIKNQRSSLRIRLFNFSLKLLTCLLYIVRVLLDDPALGIGCWGCPKQNYSFNDSSSEINWAPILWVERKMTLWAIQVIVAIISFLETMLLIYLSYKGNIWEQIFRVSFVLEMINTLPFIITIFWPPLRNLFIPVFLNCWLAKHALENMINDFHRAILRTQSAMFNQVLILFCTLLCLVFTGTCGIQHLERAGENLSLLTSFYFCIVTFSTVGYGDVTPKIWPSQLLVVIMICVALVVLPLQFEELVYLWMERQKSGGNYSRHRAQTEKHVVLCVSSLKIDLLMDFLNEFYAHPRLQDYYVVILCPTEMDVQVRRVLQIPLWSQRVIYLQGSALKDQDLMRAKMDNGEACFILSSRNEVDRTAADHQTILRAWAVKDFAPNCPLYVQILKPENKFHVKFADHVVCEEECKYAMLALNCICPATSTLITLLVHTSRGQEGQESPEQWQRMYGRCSGNEVYHIRMGDSKFFREYEGKSFTYAAFHAHKKYGVCLIGLKREDNKSILLNPGPRHILAASDTCFYINITKEENSAFIFKQEEKRKKRAFSGQGLHEGPARLPVHSIIASMGTVAMDLQGTEHRPTQSGGGGGGSKLALPTENGSGSRRPSIAPVLELADSSALLPCDLLSDQSEDEVTPSDDEGLSVVEYVKGYPPNSPYIGSSPTLCHLLPVKAPFCCLRLDKGCKHNSYEDAKAYGFKNKLIIVSAETAGNGLYNFIVPLRAYYRSRKELNPIVLLLDNKPDHHFLEAICCFPMVYYMEGSVDNLDSLLQCGIIYADNLVVVDKESTMSAEEDYMADAKTIVNVQTMFRLFPSLSITTELTHPSNMRFMQFRAKDSYSLALSKLEKRERENGSNLAFMFRLPFAAGRVFSISMLDTLLYQSFVKDYMITITRLLLGLDTTPGSGYLCAMKITEGDLWIRTYGRLFQKLCSSSAEIPIGIYRTESHVFSTSEPHDLRAQSQISVNVEDCEDTREVKGPWGSRAGTGGSSQGRHTGGGDPAEHPLLRRKSLQWARRLSRKAPKQAGRAAAAEWISQQRLSLYRRSERQELSELVKNRMKHLGLPTTGYDEMNDHQNTLSYVLINPPPDTRLEPSDIVYLIRSDPLAHVASSSQSRKSSCSHKLSSCNPETRDETQL

SEQ ID NO: 3528 - protein, 1235 aa, Homo sapiens
MPLPDGARTPGGVCREARGGGYTNRTFEFDDGQCAPRRPCAGDGALLDTAGFKMSDLDSEVLPLPPRYRFRDLLLGDPSFQNDDRVQVEFYVNENTFKERLKLFFIKNQRSSLRIRLFNFSLKLLTCLLYIVRVLLDDPALGIGCWGCPKQNYSFNDSSSEINWAPILWVERKMTLWAIQVIVAIISFLETMLLIYLSYKGNIWEQIFRVSFVLEMINTLPFIITIFWPPLRNLFIPVFLNCWLAKHALENMINDFHRAILRTQSAMFNQVLILFCTLLCLVFTGTCSIQHLERAGENLSLLTSFYFCIVTFSTVGYGDVTPKIWPSQLLVVIMICVALVVLPLQFEELVYLWMERQKSGGNYSRHRAQTEKHVVLCVSSLKIDLLMDFLNEFYAHPRLQDYYVVILCPTEMDVQVRRVLQIPLWSQRVIYLQGSALKDQDLMRAKMDNGEACFILSSRNEVDRTAADHQTILRAWAVKDFAPNCPLYVQILKPENKFHVKFADHVVCEEECKYAMLALNCICPATSTLITLLVHTSRGQEGQESPEQWQRMYGRCSGNEVYHIRMGDSKFFREYEGKSFTYAAFHAHKKYGVCLIGLKREDNKSILLNPGPRHILAASDTCFYINITKEENSAFIFKQEEKRKKRAFSGQGLHEGPARLPVHSIIASMGTVAMDLQGTEHRPTQSGGGGGGSKLALPTENGSGSRRPSIAPVLELADSSALLPCDLLSDQSEDEVTPSDDEGLSVVEYVKGYPPNSPYIGSSPTLCHLLPVKAPFCCLRLDKGCKHNSYEDAKAYGFKNKLIIVSAETAGNGLYNFIVPLRAYYRSRKELNPIVLLLDNKPDHHFLEAICCFPMVYYMEGSVDNLDSLLQCGIIYADNLVVVDKESTMSAEEDYMADAKTIVNVQTMFRLFPSLSITTELTHPSNMRFMQFRAKDSYSLALSKLEKRERENGSNLAFMFRLPFAAGRVFSISMLDTLLYQSFVKDYMITITRLLLGLDTTPGSGYLCAMKITEGDLWIRTYGRLFQKLCSSSAEIPIGIYRTESHVFSTSEPHDLRAQSQISVNVEDCEDTREVKGPWGSRAGTGGSSQGRHTGGGDPAEHPLLRRKSLQWARRLSRKAPKQAGRAAAAEWISQQRLSLYRRSERQELSELVKNRMKHLGLPTTGYDEMNDHQNTLSYVLINPPPDTRLEPSDIVYLIRSDPLAHVASSSQSRKSSCSHKLSSCNPETRDETQL

SEQ ID NO: 3529 - protein, 1235 aa, Homo sapiens
MPLPDGARTPGGVCREARGGGYTNRTFEFDDGQCAPRRPCAGDGALLDTAGFKMSDLDSEVLPLPPRYRFRDLLLGDPSFQNDDRVQVEFYVNENTFKERLKLFFIKNQRSSLRIRLFNFSLKLLTCLLYIVRVLLDDPALGIGCWGCPKQNYSFNDSSSEINWAPILWVERKMTLWAIQVIVAIISFLETMLLIYLSYKGNIWEQIFRVSFVLEMINTLPFIITIFWPPLRNLFIPVFLNCWLAKHALENMINDFHRAILRTQSAMFNQVLILFCTLLCLVFTGTCGIQHLERAGENLSLLTSFYFCIVTFSTVGYGDVTPKIWPSQLLVVIMICVALVVLPLQFEELVYLWMERQKSGGNYSRHRAQTEKHVVLCVSSLKIDLLMDFLNEFYAHPQLQDYYVVILCPTEMDVQVRRVLQIPLWSQRVIYLQGSALKDQDLMRAKMDNGEACFILSSRNEVDRTAADHQTILRAWAVKDFAPNCPLYVQILKPENKFHVKFADHVVCEEECKYAMLALNCICPATSTLITLLVHTSRGQEGQESPEQWQRMYGRCSGNEVYHIRMGDSKFFREYEGKSFTYAAFHAHKKYGVCLIGLKREDNKSILLNPGPRHILAASDTCFYINITKEENSAFIFKQEEKRKKRAFSGQGLHEGPARLPVHSIIASMGTVAMDLQGTEHRPTQSGGGGGGSKLALPTENGSGSRRPSIAPVLELADSSALLPCDLLSDQSEDEVTPSDDEGLSVVEYVKGYPPNSPYIGSSPTLCHLLPVKAPFCCLRLDKGCKHNSYEDAKAYGFKNKLIIVSAETAGNGLYNFIVPLRAYYRSRKELNPIVLLLDNKPDHHFLEAICCFPMVYYMEGSVDNLDSLLQCGIIYADNLVVVDKESTMSAEEDYMADAKTIVNVQTMFRLFPSLSITTELTHPSNMRFMQFRAKDSYSLALSKLEKRERENGSNLAFMFRLPFAAGRVFSISMLDTLLYQSFVKDYMITITRLLLGLDTTPGSGYLCAMKITEGDLWIRTYGRLFQKLCSSSAEIPIGIYRTESHVFSTSEPHDLRAQSQISVNVEDCEDTREVKGPWGSRAGTGGSSQGRHTGGGDPAEHPLLRRKSLQWARRLSRKAPKQAGRAAAAEWISQQRLSLYRRSERQELSELVKNRMKHLGLPTTGYDEMNDHQNTLSYVLINPPPDTRLEPSDIVYLIRSDPLAHVASSSQSRKSSCSHKLSSCNPETRDETQL

SEQ ID NO: 3530 - protein, 1235 aa, Homo sapiens
MPLPDGARTPGGVCREARGGGYTNRTFEFDDGQCAPRRPCAGDGALLDTAGFKMSDLDSEVLPLPPRYRFRDLLLGDPSFQNDDRVQVEFYVNENTFKERLKLFFIKNQRSSLRIRLFNFSLKLLTCLLYIVRVLLDDPALGIGCWGCPKQNYSFNDSSSEINWAPILWVERKMTLWAIQVIVAIISFLETMLLIYLSYKGNIWEQIFRVSFVLEMINTLPFIITIFWPPLRNLFIPVFLNCWLAKHALENMINDFHRAILRTQSAMFNQVLILFCTLLCLVFTGTCGIQHLERAGENLSLLTSFYFCIVTFSTVGYGDVTPKIWPSQLLVVIMICVALVVLPLQFEELVYLWMERQKSGGNYSRHRAQTEKHVVLCVSSLKIDLLMDFLNEFYAHPRLQDYYVVILCPTEMDVQVRRVLQIPLWSQQVIYLQGSALKDQDLMRAKMDNGEACFILSSRNEVDRTAADHQTILRAWAVKDFAPNCPLYVQILKPENKFHVKFADHVVCEEECKYAMLALNCICPATSTLITLLVHTSRGQEGQESPEQWQRMYGRCSGNEVYHIRMGDSKFFREYEGKSFTYAAFHAHKKYGVCLIGLKREDNKSILLNPGPRHILAASDTCFYINITKEENSAFIFKQEEKRKKRAFSGQGLHEGPARLPVHSIIASMGTVAMDLQGTEHRPTQSGGGGGGSKLALPTENGSGSRRPSIAPVLELADSSALLPCDLLSDQSEDEVTPSDDEGLSVVEYVKGYPPNSPYIGSSPTLCHLLPVKAPFCCLRLDKGCKHNSYEDAKAYGFKNKLIIVSAETAGNGLYNFIVPLRAYYRSRKELNPIVLLLDNKPDHHFLEAICCFPMVYYMEGSVDNLDSLLQCGIIYADNLVVVDKESTMSAEEDYMADAKTIVNVQTMFRLFPSLSITTELTHPSNMRFMQFRAKDSYSLALSKLEKRERENGSNLAFMFRLPFAAGRVFSISMLDTLLYQSFVKDYMITITRLLLGLDTTPGSGYLCAMKITEGDLWIRTYGRLFQKLCSSSAEIPIGIYRTESHVFSTSEPHDLRAQSQISVNVEDCEDTREVKGPWGSRAGTGGSSQGRHTGGGDPAEHPLLRRKSLQWARRLSRKAPKQAGRAAAAEWISQQRLSLYRRSERQELSELVKNRMKHLGLPTTGYDEMNDHQNTLSYVLINPPPDTRLEPSDIVYLIRSDPLAHVASSSQSRKSSCSHKLSSCNPETRDETQL

SEQ ID NO: 3531 - protein, 1235 aa, Homo sapiens
MPLPDGARTPGGVCREARGGGYTNRTFEFDDGQCAPRRPCAGDGALLDTAGFKMSDLDSEVLPLPPRYRFRDLLLGDPSFQNDDRVQVEFYVNENTFKERLKLFFIKNQRSSLRIRLFNFSLKLLTCLLYIVRVLLDDPALGIGCWGCPKQNYSFNDSSSEINWAPILWVERKMTLWAIQVIVAIISFLETMLLIYLSYKGNIWEQIFRVSFVLEMINTLPFIITIFWPPLRNLFIPVFLNCWLAKHALENMINDFHRAILRTQSAMFNQVLILFCTLLCLVFTGTCGIQHLERAGENLSLLTSFYFCIVTFSTVGYGDVTPKIWPSQLLVVIMICVALVVLPLQFEELVYLWMERQKSGGNYSRHRAQTEKHVVLCVSSLKIDLLMDFLNEFYAHPRLQDYYVVILCPTEMDVQVRRVLQIPLWSQRVIYLQGSALKDQDLMRAKMDNGEACFILSSRNEVDRTAADHQTILRAWAVKDFAPNCPLYVQILKPENKFHVKFADHVVCEEECKYAMLALNCICPATSTLITLLVHTSRGQEGQESPEQWQRMYGRCSGNEVYHIRMGDSKFFREYEGKSFTYAAFHAHKKYGVCLIGLKREDNKSILLNPGPRHILAASDTCFYINITKEENSAFIFKQEEKRKKRAFSGQGLHEGPARLPVHSIIASMGTVAMDLQGTEHRPTQSGGGGGGSKLALPTENGSGSRRPSIAPVLELADSSALLPCDLLSDQSEDEVTPSDDEGLSVVEYVKGYPPNSPYIGSSPTLCHLLPVKAPFCCLRLDKGCKHNSYEDAKAYGFKNKLIIVSAETAGNGLYNFIVPLRAYYRSRKELNPIVLLLDNKPDHHFLEAICCFPMVYYMEGSVDNLDSLLQCGIIYADNLVVVDKESTMSAEEDYMADAKTIVNVQTMFRLFPSLSITTELTHPSNMCFMQFRAKDSYSLALSKLEKRERENGSNLAFMFRLPFAAGRVFSISMLDTLLYQSFVKDYMITITRLLLGLDTTPGSGYLCAMKITEGDLWIRTYGRLFQKLCSSSAEIPIGIYRTESHVFSTSEPHDLRAQSQISVNVEDCEDTREVKGPWGSRAGTGGSSQGRHTGGGDPAEHPLLRRKSLQWARRLSRKAPKQAGRAAAAEWISQQRLSLYRRSERQELSELVKNRMKHLGLPTTGYDEMNDHQNTLSYVLINPPPDTRLEPSDIVYLIRSDPLAHVASSSQSRKSSCSHKLSSCNPETRDETQL

SEQ ID NO: 3532 - protein, 1235 aa, Homo sapiens
MPLPDGARTPGGVCREARGGGYTNRTFEFDDGQCAPRRPCAGDGALLDTAGFKMSDLDSEVLPLPPRYRFRDLLLGDPSFQNDDRVQVEFYVNENTFKERLKLFFIKNQRSSLRIRLFNFSLKLLTCLLYIVRVLLDDPALGIGCWGCPKQNYSFNDSSSEINWAPILWVERKMTLWAIQVIVAIISFLETMLLIYLSYKGNIWEQIFRVSFVLEMINTLPFIITIFWPPLRNLFIPVFLNCWLAKHALENMINDFHRAILRTQSAMFNQVLILFCTLLCLVFTGTCGIQHLERAGENLSLLTSFYFCIVTFSTVGYGDVTPKIWPSQLLVVIMICVALVVLPLQFEELVYLWMERQKSGGNYSRHRAQTEKHVVLCVSSLKIDLLMDFLNEFYAHPRLQDYYVVILCPTEMDVQVRRVLQIPLWSQRVIYLQGSALKDQDLMRAKMDNGEACFILSSRNEVDRTAADHQTILRAWAVKDFAPNCPLYVQILKPENKFHVKFADHVVCEEECKYAMLALNCICPATSTLITLLVHTSRGQEGQESPEQWQRMYGRCSGNEVYHIRMGDSKFFREYEGKSFTYAAFHAHKKYGVCLIGLKREDNKSILLNPGPRHILAASDTCFYINITKEENSAFIFKQEEKRKKRAFSGQGLHEGPARLPVHSIIASMGTVAMDLQGTEHRPTQSGGGGGGSKLALPTENGSGSRRPSIAPVLELADSSALLPCDLLSDQSEDEVTPSDDEGLSVVEYVKGYPPNSPYIGSSPTLCHLLPVKAPFCCLRLDKGCKHNSYEDAKAYGFKNKLIIVSAETAGNGLYNFIVPLRAYYRSRKELNPIVLLLDNKPDHHFLEAICCFPMVYYMEGSVDNLDSLLQCGIIYADNLVVVDKESTMSAEEDYMADAKTIVNVQTMFRLFPSLSITTELTHPSNMRFMQFRTKDSYSLALSKLEKRERENGSNLAFMFRLPFAAGRVFSISMLDTLLYQSFVKDYMITITRLLLGLDTTPGSGYLCAMKITEGDLWIRTYGRLFQKLCSSSAEIPIGIYRTESHVFSTSEPHDLRAQSQISVNVEDCEDTREVKGPWGSRAGTGGSSQGRHTGGGDPAEHPLLRRKSLQWARRLSRKAPKQAGRAAAAEWISQQRLSLYRRSERQELSELVKNRMKHLGLPTTGYDEMNDHQNTLSYVLINPPPDTRLEPSDIVYLIRSDPLAHVASSSQSRKSSCSHKLSSCNPETRDETQL

SEQ ID NO: 3533 - DNA, 5945 bp, Mus musculus
ggaccattccactgtgctgcgcgttgggggtgaggtgcgcggtggttgcgcccggcgccgcccccgcccccgccacccgcgccaagcgctcccgcaggatggcgcgggccaagctgccgcgctcgccgtccgagggcaaggcgggtccgggggacaccccagccggcgctgcagcccctgaggagccacacgggctcagcccgctactgccggcccgcggcgggggctccgtgggcagcgacgtgggccagagggtccaggtggagttctatgtcaatgagaacaccttcaaagagcggctcaagctgttcttcatcaaaaaccaaagatccagcctgaggatccggctgttcaacttctccctcaagctcctcacctgcctgctgtatatcgtccgtgtcctgcttgacaacccagaccagggcatcggatgctggggctgcacgaagtataactacactttcaatggctcatcctctgagttccactgggctcccatcctgtgggtggagaggaaaatggctctgtgggtgatccaggtcattgtggccacaataagcttcttagagaccatgctcatcatttacctcagctacaaaggcaacatctgggagcagatattccatgtgtctttcgtcttggagatgatcaacacactgcccttcatcatcacggtcttctggccacctctgcggaacctgttcatccccgtgtttctcaactgctggctggccaagcatgcgctggagaacatgattaatgacttccaccgtgccatcctacgcacacagtcagccatgttcaaccaggtgctcatcctgttctgcaccctgctgtgcctggtcttcacagggacctgtgggatccagcacctggagcgagcaggtggcaacttgaacctgctgacctccttctacttctgcatcgtgactttctcaactgtgggcttcggtgatgtgacgcccaagatctggccatcccagctcctggtggtcatcctgatctgtgtcacccttgtggtgctcccactgcaatttgaagagcttgtctacctctggatggagcgtcagaagtcagggggcaactatagccgccaccgagcacggacggagaagcacgtagtcctgtgtgtgagctccctcaagattgatctcctcatggacttcctgaatgagttctatgcccatccccggctccaggactactacgtggtcatcctgtgtccctctgaaatggacgtccaggtgcgcagggtgctgcagattcccctgtggtcccagcgggtcatctacctccagggctctgccctcaaggaccaggatctcatgcgagccaagatggacaacggagaggcctgctttatcctcagcagcaggaatgaggtggaccgcacagctgcggatcaccagaccatccttcgagcctgggctgtgaaggactttgcccccaactgtcccctctatgtccagatcctcaagcccgaaaacaagtttcacgtcaaatttgctgaccacgtggtatgcgaggaagagtgcaagtacgccatgctggccctgaactgcatctgcccggccacctccaccctcatcaccctgctggtgcacacgtcccgtggccaggaaggacaggagtctcccgagcagtggcagcgcacgtacgggaggtgctcgggcaacgaggtgtaccacattcgcatgggtgacagtaaattcttccgggagtatgagggcaagagcttcacctacgcagccttccacgcgcacaagaaatatggggtgtgcctcatcgggctgaagcgtgaggagaacaagagtatcctgctgaacccaggaccacggcacatcctggctgcctccgacacctgcttctatatcaatattaccaaggaggagaactcagctttcatcttcaaacaggaggagaagcagaagagacggggccttgcagggcaggcactatatgaagggccctcccggctcccagtgcatagcatcatcgcctctatggggacagtggccatggacctgcagaacacagattgccggccctcccagggtggcagtggcggggacggcacaaagctgactctgcccaccgagaacggctctggtagtcgacgccccagcatcgcacccgttctggagttggcagacagctcagccctgttgccctgcgacctgctgagtgaccagtcagaggatgaggtgacaccctcggacgacgaggggctctctgtggttgagtacgtgaagggctatccccccaactcaccctacattggcagctccccgactttatgccacctcctgcctgtgaaagcccccttctgctgcctgcggttggacaagggctgcaaacacaacagctacgaggatgccaaggcctatgggttcaagaacaagctgattattgtctctgctgagacggcaggcaacgggctctacaacttcatcgtgcctctgcgcgcctactaccggtcccgccgggagctcaaccctatcgtgttgctgcttgacaacaagcctgaccaccacttcctggaggccatctgttgcttccccatggtctactacatggagggatccgtggacaacctggacagcttactgcagtgtggcatcatctatgctgacaacctggtggtggtggacaaggagagcactatgagcgctgaagaggactacatggcagatgccaagaccatcgtcaatgtgcaaaccatgttccggcttttccccagtctcagcatcaccacggagctcacacacccttccaacatgcggttcatgcagttccgtgccaaggacagctactctctggctctttccaaacttgaaaagcaagaacgggagaacggctccaacctggccttcatgttccgcctgccatttgctgctggtcgagtatttagtatcagcatgttggatacactgctctaccagtccttcgtgaaggactacatgatcaccatcaccaggctgctcttgggccttgatactacaccaggctccggctacctctgtgcaatgaaggtaaccgaggacgacctgtggatccgcacttacggccgcctcttccagaaactctgctcctccagcgccgagatccccatcggcatctacaggaccgagtgccatgtcttctcggagccccatgacgtcagagcccagtctcagatctcggtgaacatggaggactgcgaggatactcgggaggccaagggaccctggggcacacgagctgcatctggcagtggcagcacccatggccgtcacgggggcagtgctgacccagtggagcacccactactacgtcgcaagagcctgcagtgggcccgcaagctgagtcgcaagagcaccaagcaggcagggaaggcacctgtggccacagactggatcacccagcagcggctcagcctgtaccgacgctcagagcgccaggagctctcagagctggtcaagaaccgaatgaagcacctgggactgcccaccactggctatgaggacgtagcaaatttaacagccagtgatgtgatgaatcgggtaaacctgggatatttgcaagatgagatgaacgatcatcaccagaacaccctttcctatgtactcatcaaccccccgccagacacaagactggaacccaacgacattgtgtacctcatccgttccgaccccctggcccatgtggccagcagctcccagagtcggaaaagcagctgcagcaacaagctctcatcctgtaatcctgagaccagggatgagacccagctctgagccccatgctggggcgaacaggacgacacaggagaagagaggagacactgtcacaggctggcctggcccaagcaggctgcattatgactttatacagtggctccaagacttgcccccagaaaggaaatcctctcagtggggccagtcgtgagaccactggaccactctggaaagtggcatgaagcatttttttaaccttttttacaaatctgaatgatttgcatctctttacatagctgtaccacaactcgtgactggggtctggctaaagagtgaggcaagcagacaggacagggactggaccctatcctggatccctccgtcttgcatggcttcactcagcaatttctgaaggggtgctggggtgcatgggagaagtaatgacctggaactggagagttccataggggactggggagtcctcctgcatggaagccagctgtgttctctagccattcaacatgctgttctgatcagtttctgcatggttctgggagtacaccagggcctatggggtgcctctccccagaaccaggcaaggggccaaccagtaaaggtgccatgccctttaagaggagaaaaacagaggggcttagaaacctggtcgggagagccccaacctgagtctgagctctgcagcccctgcatgggggagggggaccacagtggctcctccagaagtcctgagctgtggatggaagtcaaaatgttctttctagctctcacacttgagctttcctagccatggcctttggggacatcgaactggcagatgatgtgtctccacagaccatttcacactcaaactcttgtctctaaactcctgatctgagaagcacaattagctctgggccctggtcatgcctcaggtctccagggattgcttcaggcagctgacttcattcttgtttatggtttgtatgatcagaactggaaccttctattaaaatggatacatcctgcaggcatgcatggaacaaggcagcccaccatagctctggaatggtggtggtggtggtggggagacagctgaggctcacctgttttagggttagaattgcctcatgtatccctcaccccagacttcacagactagctcccaacctctgggatggccagcagggccttcccaaaatagtaatgaaatcctctgtggctgcaggtggctgggcctagacagctgctccaaggtgtatggggacgtgatccccagaggacctcttggcaagctttccattggtttccccctatggtccagtccagcatgtcccaaagataggcacaactcacttaaggtctcaacgcctggagatccacccttaccccacacttgggaggaaggtgtccctgatgtgactatgtgaacttcccccttaagtgtcctgaaaggttggggtgaagggatgggaccaaagggcctacacttcctcagccagagcagatggaacctcaggagagcaggagataagggtcaaggcagttgctgtagcttgcttgagagcacttgcacctacgtctccccttcccataacctgcctgcatatccagccttcctattgccactctgtgcctgttggaaccttcttgctcacaaagtatgcatgagtcctggtgaggtgtaatgggacagagctggctctaaggactcagggaagaagtttgggggcttgggtagagaagcaggtggctcacacagggcttggctggccaggacttatctaggctaggatctgtcagtggccatcactctggagcaggaggggtctgagtctatactcacattctctctccctgctcagccacctgccaggctgctgagcccagagaaacaggaaagctggtcttcatctagatgggactaaatagccttcaagtccatgggaagagctgccacttctgaggcaccttggggaaagccacctgctccaggccctgtcaggatgtttactctcgtgttcatctgcagcatggaaacacatttcagactttaacagtgtgaggagggcactcctcccacagctatagacagatacttccagcccagcctttgctagcttttaaagatgcccagccctggggctggcatttgggccaggaggatttgtgtgctcagataccagtcaccagatcaataaaagccacctgcacacctggaaaaaaaaaaaaaaaaaa

SEQ ID NO: 3534 - DNA, 6233 bp, Macaca fascicularis
caggcggccctgcgcgggggacggcgcgctcctggacaccgccggcttcaagatgagcgacctggactcggaggtgctgcccttgccgccgcgctaccgcttccgggacctgctgctgggcgacccgtccttccagaacgacgacagggtccaggtggagttctacgtcaatgagaacaccttcaaggagcggctcaagctgttcttcatcaaaaaccaaagatcgagcctaaggatccggctgttcaacttctccctgaagctcctcacctgcctgctctacatcgtgcgcgtcctgcttgacgacccggccctgggcatcggatgctggggctgcccaaagcagaactactccttcaatgactcgtcctccgagatcaactgggctcccattctatgggtggagagaaagatgacactgtgggcaatccaggtcatcgtggccataataagcttcctggagacaatgcttctcatctacctcagctacaaaggcaacatctgggagcaaatcttccgcgtgtccttcgtcctggagatgatcaacactctgcccttcatcatcacgatcttctggccgccgctgcggaacctgttcatccctgtctttctgaactgctggctggccaagcacgcgctggaaaacatgattaacgacttccaccgtgccatcctgcggacgcagtcggccatgttcaaccaggtcctcatcctcttctgcaccctgctgtgcctcgttttcacggggacctgtggcatccagcacctggagcgggcaggcgagaacctgtccctcctgacctccttctacttctgcatcgtcaccttctccaccgtgggctacggcgatgtcacgcccaagatctggccgtcgcagctgctggtggtcatcatgatctgcgtggccctcgtggtgctcccactgcagttcgaggagctcgtctacctctggatggagcggcagaagtcggggggcaactacagccgccaccgcgcgcagacggagaagcacgtggtcctgtgcgtcagctccctcaagatcgacctcctcatggacttcctgaacgagttctacgcccacccccggctccaggactattacgtggtcatcctgtgccccacggagatggatgtccaggtacgcagagtcctgcagatccctctgtggtcccagcgggtcatctacctccagggctctgcgctcaaagaccaggacctcatgcgagccaagatggacaatggggaggcctgcttcattctcagcagcaggaacgaggtggaccgcacggccgcggaccaccagaccatcctgcgtgcctgggccgtgaaggacttcgcccccaactgccccctctacgtccagatcctcaaacctgaaaacaagtttcatgtcaagtttgctgaccacgtggtgtgtgaggaggagtgcaagtatgccatgctggcgctgaactgcatctgcccggccacctccaccctcatcaccctgctggtgcacacgtcccgcggccaggagggacaggagtccccggagcagtggcagcgcatgtacggacgctgctcgggcaatgaggtgtaccacatccgcatgggtgacagcaagttcttccgcgagtacgagggcaagagcttcacctacgcggccttccacgcccacaagaagtacggcgtgtgcctcatcgggctgaagcgagaggacaacaagagcatcctgctgaatccggggccccggcacatcctggccgcctcggacacctgcttctacatcaacatcaccaaggaggagaactcggccttcatcttcaagcaggaggagaagcggaagaagagggccttctcggggcaggggctgcacgagggtccagcccgcctgcctgtgcatagcatcatcgcctccatgggtgagccggggcaggcgcgcaggactccctggggctgctcctctggtgagagaccgggcgggacagggcaggtgaccagttgggacaggtgcgggagacccggcggggcggggcagggcaggagaccaggtagggcgggagaccaagtgggacagggcgggagaccagccaggcagggcaggagacccggccagtgtggcctccagacccagctcctcttggcctcaacgtggctgtggggggcgtgggtgccctcgagtcccccagcccgggggaggggccagagcagacccagccacccgtatgcagctgtgctgagggctcctgtctcctgccccaggtacgtgaagggctaccctcccaactcgccctacatcggcagctccccaaccctgtgccacctcctgcctgtgaaggcccccttctgctgcctgcggctggacaagggctgcaaacacaacagctatgaagacgccaaggcctacgggttcaagaacaagctgatcatcgtctcggcagagacggccggcaacgggctgtacaacttcatcgtgccgctgcgggcctactacagatcccgcaaggagttaaaccccattgtgctgctgctggacaacaagccggaccaccacttcctggaagctatctgctgcttccccatggtctactacatggagggctccgtggacaacctggacagcctgctgcagtgcggaatcatctatgcggacaacctcgtggtggtggacaaggagagcaccatgagcgctgaggaggactacatggcggatgccaagaccatcgtcaacgtgcagaccatgttccggctcttccccagcctcagcatcaccacggagctcacccacccttccaacatgcgcttcatgcagttccgcgccaaggacagctactctctggctctttccaaactagaaaagagggagcgagagaacggctccaacctggccttcatgttccgcctgccctttgccgccggccgcgtcttcagcatcagcatgttggacacgctgctctaccagtccttcgtgaaggactacatgatcaccatcacccggctgctgctgggcctggacaccacaccgggctcggggtacctctgtgccatgaaaatcaccgagggcgacctgtggatccgcacgtacggccgcctcttccagaagctctgctcctccagcgccgagatccccatcggcatctaccggacagagagccacgtcttctccacctcggagccgcacgacctcagagcccagtcccagatctcggtgaacatggaggactgtgaggacacacgggaagcgagggggccctggggctcgcgcgccggcaccggaggcagctcccacggccgacacacgggcggcagtgaccccgcggagcaccggctgctgcggcataagagtctgcagtgggcccggaggctgagccgcaagggacccaagcagggaggccgggcagcggccgcagagtggatcagccagcagcgcctcagcctgtaccggcgttccgagcgccaggagctctccgagctggtgaagaaccgcatgaaacacctgggcctgcccaccaccggctacgacgagatgaacgaccatcagaacaccctctcctacgtcctcatcaaccctccgcccgacacgaggctggagcccagcgacattgtctatctcatccgctccgaccccctggctcacgtggccagcagctcccagagccgcaagagcagctgcagccacaagctatcgtcctgcaaccccgagactcgcgacgagacgcagctctgagccagccctgcacggagctcgggccaccaagcccagggtcctcaggaaggacgtggaggagcgtgtgaggacacagtggcactagcgagaccctggggatgccacactctgctcaccgtggctcctgggactccaccctggaaaggagcgcctcgtgcggggggagggccaactcgggtacctgaaggctagtgaggagagttttttaacctatttttacagaccgatgcagtccacgtctctttacacagatgtaccgtaactcgtgaccagggctggctgggagggcaacgcggggaccagacgccccgcagggccgagcccaggctgtcctggagggtggggctggctggggtgcatggggaggggaagagaacccaggagccctgcatgggccacacccaactcagagccagcctgagttttcatggccaagcggcctcacttccttccagccaaggcctgaggcccggggctgccatgctgcactctgtggggccggtgaggggcaccctctgctctttgctgtcctgagtcccttctggaagtcagaagcagcaaagggcccggggaagccgggcgtgtgtgaggggtgcatccccaggtgccccagagggccctgttgccaaggacctttctgaaggtcacgagcagaagcagaagacgccatttcctctacttcacactgaactttcccggccactgcgtctgggcggcgtttgggtggaagatggtgcatttccacggaccattttacacttaccttttaaagcaaagcctcgttttctaaacccctgactcgtgaagcacaattcagcctccgggctgggccatgtggagggagaggaccttctcagcaaggcgagatcccgggtggcggctgacatcgggagcgtcgccctgcgtcctttgctgctggttccttactggttggtacggtcagtgctggaaccttctattaaacggatgcattctggaggcatgaagttacaagttgccccactcgtggttccaaggctctcacccctcccagccaccccattttaagggttagaaacacctgctggggtccccaccccaaccccacaggcaagctcccattccccagccagaccaagacagtccttccagaactcgggaaccaaattgtatttggctactggtgactgaatcctggtagccaggaaactcatctggtggtggaggtcccagagtccaggagggctctctggtgagctgcccatcagcctcacccctgcagccaggcgtgtcactggggtggatacagaggccccaggctccgcccacagtggcacagaactcacctgaggtcagcagctgctggggatcccctacactgggggtcagggctgccccaggcagggatgtgtgtgtacctcaccacgttcatttcagggtaccccaagaggctgaaggggaaggaccaaaaggctgaggtgcagcccctccccggtgtcagggcaaacagcacagctgctagaggggccggccctggccacacgactagctagtcccttactcctggcctgcctggaaccctcctgctcagaaggtgcccactagccctcggtgggggacagagccagatatgggtggtcaggaagaggctgtgtggattcagggggccagaaagtcccaggaccttgatggagtggcaggggttgatgttgggctagagtggccagaggctgtcccagcagggctggggtctatcaggttcccgggatccaaccagcaggcacgccctgccctgcagtcaccctgcagcaggcaggtccaagcctgcctcacctaggcggcttctcgtgtcacccacaccctggcccccaggcaacagcggctgcacagcccctgcagggaggagacgggagagaaaagccggcctagcagctgggatgggagggccacagctccagtggtggcgggggaagctgtagcccctggaaccccacactgggaagagctggcctctaggaggcaccatgggggagtcacatgacttgctggggattgacttgcgatgtggacggtgttcctggagtcccttgtggccactccaccaccgggaggccgggaggcctcttggcctttgagcctctctccacaggtgagtggagtcccccaaagagggctgggggcttgctgtccaggtggggctgggtgggcactttgggcctcggagaacatcagtggtccgttccctcccgcacgtcggcggcaagtggcagcatgttcataatctccagtagcgaggccacttcaggtccagccctggacatctgaggaggcggcgggcagtccctgctccttcactaaccgcagaggatgccaggcccgtggccccctgctctgcccggagctcatgcgggcagccacggacacaggtggcacccagcggcctgtgaatcctcccgtgggcaaggctgggagccaggggctggaaccaggcaggtccatgactgtgagatgccagctgccagcccaataaaagctgcctgaagcatct

SEQ ID NO: 3535 - protein, 16 aa, Unknown
  source: /note="Description of Unknown: RFGF sequence"
AAVALLPAVLLALLAP

SEQ ID NO: 3536 - protein, 11 aa, Unknown
  source: /note="Description of Unknown: RFGF analogue sequence"
AALLPVLLAAP

SEQ ID NO: 3537 - protein, 13 aa, Human immunodeficiency virus
GRKKRRQRRRPPQ

SEQ ID NO: 3538 - protein, 16 aa, Drosophila sp.
RQIKIWFQNRRMKWKK

What is claimed is:

1. A compound comprising an oligonucleotide comprising a nucleobase sequence at least 90% complementary to at least 10 contiguous nucleobases of a transcript comprising a sequence at least 90% identity to SEQ ID NO: 3526, or a contiguous 15 to 50 nucleobase portion of SEQ ID NO: 3526, wherein at least one nucleoside linkage of the nucleobase sequence is a modified internucleoside linkage.

2. An oligonucleotide comprising a nucleobase sequence at least 90% complementary to at least 10 contiguous nucleobases of a transcript comprising a sequence at least 90% identity to SEQ ID NO: 3526, or a contiguous 15 to 50 nucleobase portion of SEQ ID NO: 3526, wherein at least one nucleoside linkage of the nucleobase sequence is a modified internucleoside linkage.

3. The compound comprising an oligonucleotide of claim 1, or the oligonucleotide of claim 2, wherein the oligonucleotide comprises at least a contiguous 10 nucleobase sequence that shares 90% identity with an equal length portion of any one of SEQ ID NOs: 1-3525.

4. The compound comprising an oligonucleotide of claim 1 or 3, or the oligonucleotide of claim 2 or 3, wherein the oligonucleotide comprises at least a contiguous 11, 12, 13, 14, 15, 16, or 17 nucleobase sequence that shares at least 90% identity with an equal length portion of any one of SEQ ID NOs: 1-3525.

5. The compound comprising an oligonucleotide of claim 1 or 3 or the oligonucleotide of claim 2 or 3, wherein the oligonucleotide comprises at least a contiguous 10 nucleobase sequence that shares 90% identity with an equal length portion of any one of SEQ ID NOs: 1-116.

6. The compound comprising an oligonucleotide of claim 1 or 3 or the oligonucleotide of claim 2 or 3, wherein the oligonucleotide comprises at least a contiguous 10 nucleobase sequence that shares at least 90% identity with an equal length portion of any one of SEQ ID NOs: 1, 4, 5, 6, 8, 10, 12, 13, 15, 17, 28, 29, 62, 625-649, 1046, 1071, 1195-1224, 1388, 1496-1567, 2591-2631, or 3395-3525, wherein at least one nucleoside linkage of the nucleobase sequence is a modified internucleoside linkage.

7. The compound comprising an oligonucleotide of any one of claim 1 or 3-6 or the oligonucleotide of any one of claims 2-6, wherein the oligonucleotide comprises at least a contiguous 10 nucleobase sequence that shares at least 90% identity with an equal length portion of any one of SEQ ID NOs: 4, 1046, 1071, 1388, 1551, 1546, or 2595.

8. The compound comprising an oligonucleotide of any one of claim 1 or 3-7 or the oligonucleotide of any one of claims 2-7, wherein the oligonucleotide comprises at least a contiguous 11, 12, 13, 14, 15, 16, or 17 nucleobase sequence that shares at least 90% identity with an equal length portion of any one of SEQ ID NOs: 1, 4, 5, 6, 8, 10, 12, 13, 15, 17, 28, 29, 62, 625-649, 1046, 1071, 1195-1224, 1388, 1496-1567, 2591-2631, or 3395-3525.

9. The compound comprising an oligonucleotide of any one of claim 1 or 3-8 or the oligonucleotide of any one of claims 2-8, wherein the oligonucleotide comprises at least a contiguous 11, 12, 13, 14, 15, 16, or 17 nucleobase sequence that shares at least 90% identity with an equal length portion of any one of SEQ ID NOs: 4, 1046, 1071, 1388, 1551, 1546, or 2595.

10. A compound comprising an oligonucleotide comprising at least 10 contiguous nucleobases that share 90% identity to an equal length portion of any one of SEQ ID 1, 4, 5, 6, 8, 10, 12, 13, 15, 17, 28, 29, 62, 625-649, 1046, 1071, 1195-1224, 1388, 1496-1567, 2591-2631, or 3395-3525, wherein at least one nucleoside linkage of the nucleobase sequence is a modified internucleoside linkage.

11. An oligonucleotide comprising at least 10 contiguous nucleobases that share 90% identity to an equal length portion of any one of SEQ ID NOs: 1, 4, 5, 6, 8, 10, 12, 13, 15, 17, 28, 29, 62, 625-649, 1195-1224, 1496-1567, 2591-2631, or 3395-3525, wherein at least one nucleoside linkage of the nucleobase sequence is a modified internucleoside linkage.

12. The compound comprising an oligonucleotide of claim 10, or the oligonucleotide of claim 11, wherein the oligonucleotide comprises at least 10 contiguous nucleobases that share 90% identity to an equal length portion of any one of SEQ ID NOs: 4, 1046, 1071, 1388, 1551, 1546, or 2595.

13. The compound comprising an oligonucleotide of claim 10, or the oligonucleotide of claim 11, wherein the oligonucleotide comprises at least 11, 12, 13, 14, 15, 16, 17, 18, or 19 contiguous nucleobases of any one of SEQ ID NOs: 1, 4, 5, 6, 8, 10, 12, 13, 15, 17, 28, 29, 62, 625-649, 1046, 1071, 1195-1224, 1338, 1496-1567, 2591-2631, or 3395-3525.

14. The compound comprising an oligonucleotide of claim 13, or the oligonucleotide of claim 13, wherein the oligonucleotide comprises at least 11, 12, 13, 14, 15, 16, 17, 18, or 19 contiguous nucleobases of any one of SEQ ID NOs: 4, 1046, 1071, 1388, 1551, 1546, or 2595.

15. A compound comprising an oligonucleotide comprising at least 10 contiguous nucleobases which is at least 90% complementary to an equal length portion of nucleobases within a 10 nucleobase range of any one of positions 374, 661, 655-680, 765, 837, 1347, 1340-1370, 1629, 1760, 1752, 1795, 1775, 1740-1815, 2879, 3008, 3168, or 3110-3171 of SEQ ID NO: 3526, wherein at least one nucleoside linkage of the nucleobase sequence is a modified internucleoside linkage.

16. An oligonucleotide comprising at least 10 contiguous nucleobases which is at least 90% complementary to an equal length portion of nucleobases within a 10 nucleobase range of positions 374, 661, 655-680, 765, 837, 1347, 1340-1370, 1629, 1760, 1752, 1795, 1775, 1740-1815, 2879, 3008, 3168, or 3110-3171 of SEQ ID NO: 3526, wherein at least one nucleoside linkage of the nucleobase sequence is a modified internucleoside linkage.

17. The compound comprising an oligonucleotide of claim 15, or the oligonucleotide of claim 16, wherein the oligonucleotide comprises at least 10 contiguous nucleobases that are complementary to an equal length portion of nucleobases within any one of positions 655-680, 1340-137, 1740-1815, or 3110-3175 of SEQ ID NO: 3526.

18. The compound comprising an oligonucleotide of claim 17, or the oligonucleotide of claim 17, wherein the oligonucleotide comprises at least 10 contiguous nucleobases that are complementary to an equal length portion of nucleobases within any one of positions 655-665, 660-670, 665-675, or 670-680 of SEQ ID NO: 3526.

19. The compound comprising an oligonucleotide of claim 17, or the oligonucleotide of claim 17, wherein the oligonucleotide comprises at least 10 contiguous nucleobases that are complementary to an equal length portion of nucleobases within any one of positions 1340-1350, 1345-1355, 1350-1360, 1355-1365, or 1360-1370 of SEQ ID NO: 3526.

20. The compound comprising an oligonucleotide of claim 17, or the oligonucleotide of claim 17, wherein the oligonucleotide comprises at least 10 contiguous nucleobases that are complementary to an equal length portion of nucleobases within any one of positions 1740-1750, 1745-1755, 1750-1760, 1755-1765, 1760-1770, 1765-1775, 1770-1780, 1775-1785, 1780-1790, 1785-1795, 1790-1800, 1795-1805, 1800-1810, or 1805-1815 of SEQ ID NO: 3526.

21. The compound comprising an oligonucleotide of claim 17, or the oligonucleotide of claim 17, wherein the oligonucleotide comprises at least 10 contiguous nucleobases that are complementary to an equal length portion of nucleobases within any one of positions 3110-3120, 3115-3125, 3120-3130, 3125-3135, 3130-3140, 3135-3145, 3140-3150, 3145-3155, 3150-3160, 3155-3165, 3160-3170, 3165-3175, 3170-3180 of SEQ ID NO: 3526.

22. The compound comprising an oligonucleotide of claim 15, or the oligonucleotide of claim 16, wherein the oligonucleotide comprises at least 11, 12, 13, 14, 15, 16, 17, 18, or 19 contiguous nucleobases complementary to an equal length portion of nucleobases within any one of positions 374, 661, 765, 837, 1347, 1629, 2879, 3008, 3168, 1760, 1752, 1795, 1775, 655-680, 1340-1370, 1740-1815, or 3110-3171 of SEQ ID NO: 3526.

23. The compound comprising an oligonucleotide of claim 15, or the oligonucleotide of claim 16, wherein the oligonucleotide comprises at least 11, 12, 13, 14, 15, 16, 17, 18, or 19 contiguous nucleobases complementary to an equal length portion of nucleobases within any one of 655-680, 1340-137, 1740-1815, or 3110-3175 of SEQ ID NO: 3526.

24. The compound comprising an oligonucleotide of any one of claim 1 or 3-23, or the oligonucleotide of any one of claims 2-23, wherein the oligonucleotide is between 12 and 40 nucleobases in length.

25. The compound of any one of claim 1, 10, or 15, wherein the oligonucleotide comprises:
a. a gap segment comprising one or more of linked deoxyribonucleosides, 2′-Fluoro Arabino Nucleic Acids (FANA), and Fluoro Cyclohexenyl nucleic acid (F-CeNA);
b. a 5′ wing segment comprising linked nucleosides; and
c. a 3′ wing segment comprising linked nucleosides;
d. wherein the gap segment comprises a region of at least 8 contiguous nucleobases having at least 80% identity to an equal length portion of any one of SEQ ID NOs: 1-3525 positioned between the 5′ wing segment and the 3′ wing segment; wherein the 5′ wing segment and the 3′ wing segment each comprises at least two linked nucleosides; and wherein at least one nucleoside of each wing segment comprises a modified sugar.

26. The oligonucleotide of any one of claim 2, 11, or 16 comprising;
a. a gap segment comprising one or more of linked deoxyribonucleosides, 2′-Fluoro Arabino Nucleic Acids (FANA), and Fluoro Cyclohexenyl nucleic acid (F-CeNA);
b. a 5′ wing segment comprising linked nucleosides; and
c. a 3′ wing segment comprising linked nucleosides;
d. wherein the gap segment comprises a region of at least 8 contiguous nucleobases having at least 80% identity to an equal length portion of any one of SEQ ID NOs: 1-3525 positioned between the 5′ wing segment and the 3′ wing segment; wherein the 5′ wing segment and the 3′ wing segment each comprises at least two linked nucleosides; and wherein at least one nucleoside of each wing segment comprises a modified sugar.

27. The compound comprising an oligonucleotide of claim 25, or the oligonucleotide of claim 26, wherein the oligonucleotide comprises at least 13, 14, 15, 16, 17, 18, 19, or 20 linked nucleosides.

28. The compound comprising an oligonucleotide of any one of claim 1 or 3-27, or the oligonucleotide of any one of claims 2-27, wherein at least one nucleoside linkage of the nucleobase sequence is selected from the group consisting of a phosphodiester linkage, a phosphorothioate linkage, a 2′-alkoxy linkage, an alkyl phosphate linkage, alkyl phosphonate linkage, a phosphorodithioate linkage, a phosphotriester linkage, an alkylphosphonate linkage, a methylphosphonate linkage, a dimethylphosphonate linkage, an aminoalkylphosphotriester linkage, an alkylene phosphonate linkage, a phosphinate linkage, a phosphoramidate linkage, a phosphorodiamidate linkage, an aminoalkylphosphoramidate linkage, a thiophosphoramidate linkage, a thionoalkylphosphonate linkage, a thionoalkylphosphotriester linkage, a thiophosphate linkage, a selenophosphate linkage, and a boranophosphate linkage.

29. The compound comprising an oligonucleotide of claim 25 or 27, or the oligonucleotide of claim 26 or 27, wherein the at least two linked nucleosides of the 5′ wing segment are linked through a phosphodiester internucleoside linkage and wherein the at least two linked nucleosides of the 3′ wing segment are linked through a phosphodiester internucleoside linkage, and wherein at least one of the internucleoside linkages of the gap segment is a modified internucleoside linkage.

30. The compound comprising an oligonucleotide of any one of claim 25 or 27-29 or the oligonucleotide of any one of claims 26-29, wherein at least two, three, or four internucleoside linkages of the nucleobase sequence are phosphodiester internucleoside linkages.

31. The compound comprising an oligonucleotide of any one of claim 25 or 27-30, or the oligonucleotide of any one of claims 26-30, wherein at least one, two, three, or four internucleoside linkages between nucleoside bases of the gap segment are phosphodiester internucleoside linkages.

32. The compound comprising an oligonucleotide of any one of claim 1, 3-25, or 27-31, or the oligonucleotide of any one of claim 2-24 or 26-31, wherein at least two internucleoside linkages of the nucleobase sequence is a modified internucleoside linkage.

33. The compound comprising an oligonucleotide of claim 32, or the oligonucleotide of claim 32, wherein the modified internucleoside linkage of the nucleobase sequence is a phosphorothioate linkage.

34. The compound comprising an oligonucleotide of claim 32 or 33, or the oligonucleotide of claim 32 or 33, wherein all internucleoside linkages of the nucleobase sequence are phosphorothioate linkages.

35. The compound comprising an oligonucleotide of any one of claim 25, 27-28, or 32-34, or the oligonucleotide of any one of claim 26-28 or 32-34, wherein the at least two linked nucleosides of the 5′ wing segment are linked through a modified internucleoside linkage.

36. The compound comprising an oligonucleotide of any one of claim 25, 27-28, or 32-34, or the oligonucleotide of any one of claim 26-28 or 32-34, wherein the at least two linked nucleosides of the 3′ wing segment are linked through a modified internucleoside linkage.

37. The compound comprising an oligonucleotide of any one of claim 25, 27-28, or 32-36, or the oligonucleotide of any one of claim 26-28 or 32-36, wherein the at least two linked nucleosides of the 5′ wing segment are linked through a phosphorothioate internucleoside linkage and wherein the at least two linked nucleosides of the 3′ wing segment are linked through a phosphorothioate internucleoside linkage, and wherein at least one of the internucleoside linkages of the gap segment is a modified internucleoside linkage.

38. The compound comprising an oligonucleotide of any one of claim 25, 27-28, or 32-37, or the oligonucleotide of any one of claim 26-28 or 32-37, wherein at least two, three, or four internucleoside linkages of the nucleobase sequence are phosphorothioate internucleoside linkages.

39. The compound comprising an oligonucleotide of any one of claim 25, 27-28, or 32-38, or the oligonucleotide of any one of claim 26-28 or 32-38, wherein at least one, two, three, or four internucleoside linkages between nucleoside bases of the gap segment are phosphorothioate internucleoside linkages.

40. The compound comprising an oligonucleotide of any one of claim 25, 27-28, or 32-39, or the oligonucleotide of any one of claim 26-28 or 32-39, wherein the phosphorothioate internucleoside linkage is in a Rp configuration, a Sp configuration, or in any combination of Rp and Sp configuration.

41. The compound comprising an oligonucleotide of any one of claim 1, 3-25, or 27-40, or the oligonucleotide of any one of claim 2-24 or 26-40, wherein the oligonucleotide comprises at least one modified nucleobase.

42. The compound comprising an oligonucleotide of claim 41, or the oligonucleotide of claim 41, wherein the at least one modified nucleobase is 5′-methylcytosine, pseudouridine, or 5-methoxyuridine.

43. The compound comprising an oligonucleotide of any one of claim 1, 3-25, or 27-42, or the oligonucleotide of any one of claim 2-24 or 26-42, wherein the oligonucleotide comprises at least one modified sugar moiety.

44. The compound comprising an oligonucleotide of claim 43, or the oligonucleotide of claim 43, wherein the at least one modified sugar is a bicyclic sugar.

45. The compound comprising an oligonucleotide of claim 44, or the oligonucleotide of claim 44, wherein the bicyclic sugar comprises a 4′-CH(R)—O-2′ bridge wherein R is, independently, H, C₁-C₁₂ alkyl, or a protecting group.

46. The compound comprising an oligonucleotide of claim 45, or the oligonucleotide of claim 45, wherein R is methyl.

47. The compound comprising an oligonucleotide of claim 45, or the oligonucleotide of claim 45, wherein R is H.

48. The compound comprising an oligonucleotide of claim 43, or the oligonucleotide of claim 43, wherein the modified sugar moiety is one of a 2′-OMe modified sugar moiety, bicyclic sugar moiety, 2′-O-methoxyethyl (MOE), 2′-deoxy-2′-fluoro nucleoside, 2′-fluoro-β-D-arabinonucleoside, locked nucleic acid (LNA), constrained ethyl 2′-4′-bridged nucleic acid (cEt), S-cEt, tcDNA, hexitol nucleic acids (HNA), and tricyclic analog (e.g., tcDNA).

49. The compound comprising an oligonucleotide of any one of claim 1, 3-25, or 27-48, or the oligonucleotide of any one of claim 2-24 or 26-48, wherein the oligonucleotide comprises one or more 2′-O-methoxyethyl nucleosides that are linked through phosphorothioate internucleoside linkages.

50. The compound comprising an oligonucleotide of any one of claim 1, 3-25, or 27-49, or the oligonucleotide of any one of claim 2-24 or 26-49, wherein the oligonucleotide comprises three contiguous nucleoside bases that are linked through phosphorothioate internucleoside linkages at the 5′ end and three contiguous nucleoside bases that are linked through phosphorothioate internucleoside linkages at the 3′ end.

51. The compound comprising an oligonucleotide of claim 50, or the oligonucleotide of claim 50, wherein the oligonucleotide comprises five contiguous nucleoside bases that are linked through phosphorothioate internucleoside linkages.

52. The compound comprising an oligonucleotide of claim 50 or 51, or the oligonucleotide of claim 50 or 51, wherein the each of the five contiguous nucleoside bases are 2′-O-methoxyethyl nucleosides.

53. The compound comprising an oligonucleotide of any one of claims 43-52, or the oligonucleotide of any one of claims 43-52, wherein each of the nucleoside bases of the oligonucleotide are 2′-O-methoxyethyl nucleosides.

54. The compound comprising an oligonucleotide of any one of claims 43-52, or the oligonucleotide of any one of claims 43-52, wherein the gap segment comprises one or more 2′-O-methoxyethyl nucleosides.

55. The compound comprising an oligonucleotide of any one of claims 43-54, or the oligonucleotide of any one of claims 43-54, wherein the gap segment comprises phosphorothioate internucleoside linkages, wherein the 5′ wing segment comprises two contiguous nucleoside bases that are linked through phosphodiester internucleoside linkages, and wherein the 3′ wing segment comprises two contiguous nucleoside bases that are linked through phosphodiester internucleoside linkages.

56. The compound comprising an oligonucleotide of any one of claims 43-54, or the oligonucleotide of any one of claims 43-54, wherein five contiguous nucleoside bases in the gap segment are linked through phosphorothioate internucleoside linkages, wherein the 5′ wing segment comprises at least one phosphorothioate internucleoside linkage, and wherein the 3′ wing segment comprises at least one phosphorothioate internucleoside linkage.

57. The compound comprising an oligonucleotide of any one of claim 1, 3-25, or 27-56, or the oligonucleotide of any one of claim 2-24 or 26-57, comprising one or more chiral centers and/or double bonds.

58. The compound comprising an oligonucleotide of claim 57, or the oligonucleotide of claim 57, wherein the oligonucleotide exist as stereoisomers selected from geometric isomers, enantiomers, and diastereomers.

59. The compound comprising an oligonucleotide of any one of claim 1, 3-25, or 27, or the oligonucleotide of any one of claim 2-24 or 26-27, wherein the oligonucleotide comprises sugar modifications in any of the following patterns: eeeee-d10-eeeee, d20, eeeee-d12-eeeee, eeeee-d8-eeeee, and eekk-d8-kkeee, wherein e=2′-O-methoxyethyl nucleoside; d=a 2′-deoxynucleoside; k=a locked nucleic acid (LNA), constrained methoxyethyl (cMOE) nucleoside, constrained ethyl (cET) nucleoside, or peptide nucleic acid (PNA).

60. The compound comprising an oligonucleotide of any one of claim 1, 3-25, 27, or 59, or the oligonucleotide of any one of claim 2-24, 26, 27, or 59, wherein the oligonucleotide comprises internucleoside linkages in any of the following patterns: sssssssssssssssssss; sssssssssssssssssssss; sooosssssssssooss; and soosssssssssooss; wherein s=a phosphorothioate linkage, and o=a phosphodiester linkage.

61. The compound comprising an oligonucleotide of any one of claim 1, 3-25, 27, 59, or 60, or the oligonucleotide of any one of claim 2-24, 26, 27, 59, or 60, wherein the oligonucleotide comprises sugar modification and internucleoside linkage combinations, respectively, in any of the following patterns:
a) d20 and sssssssssssssssssss;
b) eeeee-d10-eeeee and sssssssssssssssssss;
c) eeeee-d12-eeeee and sssssssssssssssssssss;
d) eeeee-d8-eeeee and sooosssssssssooss; and
e) eekk-d8-kkeee and soosssssssssooss.

62. The compound comprising an oligonucleotide of any one of claim 1, 3-25, 27, or 59-61, or the oligonucleotide of any one of claim 2-24, 26, 27, or 59-61, wherein the oligonucleotide comprises a modified cytosine.

63. The compound comprising an oligonucleotide of claim 62, or the oligonucleotide of claim 62, wherein the modified cytosine is 5-methyl-dC.

64. The compound comprising an oligonucleotide of claim 63, or the oligonucleotide of claim 63, wherein the oligonucleotide comprises sugar modification and internucleoside linkage combinations eeeee-d10-eeeee and sssssssssssssssssss, and the cytosine are modified as 5-methyl-dC.

65. The compound comprising an oligonucleotide of claim 60 or 61, or the oligonucleotide of claim 60 or 61, wherein the oligonucleotide comprises sugar modification and internucleoside linkage combinations, respectively, in any of the following patterns:
a) d20 and sssssssssssssssssss;
b) eeeee-d12-eeeee and sssssssssssssssssssss;
c) eeeee-d8-eeeee and sooosssssssssooss; and
d) eekk-d8-kkeee and soosssssssssooss; and the any cytosine in the oligonucleotide is an unmodified cytosine.

66. A compound or oligonucleotide according to the compound comprising an oligonucleotide of any one of claim 1, 3-25, or 27-56, or the oligonucleotide of any one of claim 2-24 or 26-65, complementary to a nucleobase sequence of a target region of a target nucleic acid sequence, wherein the nucleobase sequence of the target region of the target nucleic acid differs from the nucleobase sequence of at least one non-target nucleic acid sequence by 1-3 differentiating nucleobases, and wherein the non-target nucleic acid comprises a sequence of SEQ ID NO: 3526.

67. The compound or oligonucleotide according to claim 66, wherein the 1-3 differentiating nucleobases comprises a single-nucleotide polymorphism (SNP).

68. The compound or oligonucleotide of claim 67, wherein the SNP present in the target region is a SNP compared to an equal length portion of SEQ ID NO: 3526.

69. The compound or oligonucleotide according to claim 66, wherein the single nucleotide polymorphism is selected from the group consisting of: rs397515403, rs397515402, rs587777264, rs397515404, rs866242631, rs886043455, rs397515407, and rs397515406.

70. The compound or oligonucleotide according to claim 66, wherein the single nucleotide polymorphism is selected from the group consisting of: a C to a G at position 1112 of the sequence shown in SEQ ID NO: 3526, a C to a T at position 2845 of the sequence shown in SEQ ID NO: 3526, and a G to a T at position 885 of the sequence shown in SEQ ID NO: 3526.

71. A pharmaceutical composition comprising the compound or oligonucleotide of any one of the above claims and a pharmaceutically acceptable carrier or excipient.

72. The pharmaceutical composition of claim 71, wherein the pharmaceutical composition is suitable for topical, intrathecal, intracisternal, parenteral, oral, pulmonary, intratracheal, intranasal, transdermal, rectal, buccal, sublingual, vaginal, or intraduodenal administration.

73. A composition comprising the compound or oligonucleotide of any one of the above claims and a lipid nanoparticle, a polyplex nanoparticle, a lipoplex nanoparticle, or a liposome.

74. A method of reducing a level and/or activity of KCNT1 in a cell of a subject having a KCNT1 related disorder, the method comprising contacting the cell with the compound of any one of claim 1, 3-25, or 27-70, the oligonucleotide of any one of claim 2-24, or 26-70, or the pharmaceutical composition of claim 71 or 72 in an amount and for a duration sufficient to reduce the level and/or activity of KCNT1 in the cell.

75. The method of claim 74, wherein the cell is a cell of the central nervous system.

76. A method of treating a neurological disease in a subject in need thereof, the method comprising administering to the patient an inhibitor of a transcript, wherein the transcript shares at least 90% identity with SEQ ID NO: 3526.

77. The method of claim 76, wherein the inhibitor is the compound comprising an oligonucleotide of any one of claim 1, 3-25, or 27-70, or the oligonucleotide of any one of claim 2-24, or 26-70 or the pharmaceutical composition of claim 71 or 72.

78. A method of treating, preventing, or delaying the progression of a KCNT1 related disorder in a subject in need thereof, the method comprising administering to the subject the compound of any one of claim 1, 3-25, or 70, the oligonucleotide of any one of claims 2-24, or 26-70 or the pharmaceutical composition of claim 71 or 72 in an amount and for a duration sufficient to treat, prevent, or delay the progression of the KCNT1 related disorder.

79. The method of any one of claims 74-78, wherein the KCNT1 related disorder is selected from the group consisting of epilepsy of infancy with migrating focal seizures, autosomal dominant nocturnal frontal lobe epilepsy, West syndrome, infantile spasms, epileptic encephalopathy, focal epilepsy, Ohtahara syndrome, developmental epileptic encephalopathy, and Lennox Gastaut syndrome.

80. The method of any one of claims 74-79, wherein the subject has a gain-of-function mutation in KCNT1.

81. The method of claim 80, wherein the gain-of-function mutation is selected from the group consisting of V271F, L274I, G288S, F346L, R398Q, R428Q, R474H, F502V, M516V, K629N, I760M, Y796H, E893K, M896I, M896K, P924L, R928C, F932I, A934T, A966T, H257D, R262Q, Q270E, V340M, C377S, P409S, L437F, R474C, A477T, R565H, K629E, G652V, I760F, Q906H, R933G, A934T, R950Q, R961H, R1106Q, K1154Q, R474Q, Y1903C, H469L, M896R, K946E, and R950L.

82. The method of claim 80 or 81, wherein the gain-of-function mutation is G288S, R398Q, R428Q, R928C, or A934T.

83. The method of any one of claims 74-82, wherein the method reduces one or more symptoms of the KCNT1 related disorder.

84. The method of claim 83, wherein the one or more symptoms of the KCNT1 related disorder is selected from the group consisting of prolonged seizures, frequent seizures, behavioral and developmental delays, movement and balance issues, orthopedic conditions, delayed language and speech issues, growth and nutrition issues, sleeping difficulties, chronic infection, sensory integration disorder, disruption of the autonomic nervous system, and sweating.

85. The method of any claims 74-84, wherein the oligonucleotide or pharmaceutical composition is administered topically, parenterally, intrathecally, intracisternally, orally, rectally, buccally, sublingually, vaginally, pulmonarily, intratracheally, intranasally, transdermally, or intraduodenally.

86. The method of any one of claims 74-85, wherein the patient is a human.

87. A compound comprising a modified oligonucleotide of 18-22 linked nucleosides in length and having at least 85% sequence complementarity to an equal length portion of H. sapiens KCNT1 and M. musculus KCNT1 transcript.

88. A compound comprising a modified oligonucleotide of 18-22 linked nucleosides in length and having at least 85% sequence complementarity to an equal length portion of H. sapiens KCNT1 and M. fascicularis KCNT1 transcript.

89. A compound comprising a modified oligonucleotide of 18-22 linked nucleosides in length and having at least 85% sequence complementarity to an equal length portion of H. sapiens KCNT1, M. musculus KCNT1, and/or M. fascicularis KCNT1 transcript.

90. The compound of any one of claims 87-89, wherein the oligonucleotide comprises a GC content from 40% to 70%.

91. The compound of any one of claims 87-90, wherein the oligonucleotide comprises no more than 2 mismatches to H. sapiens KCNT1 transcript.

92. The compound of any one of claims 87-91, wherein the oligonucleotide comprises at least 3 mismatches to any non KCNT1 transcript.

93. The compound of any one of claims 87-92, wherein the oligonucleotide lacks a GGGG tetrad.

94. The method of any one of claims 74-86, wherein the oligonucleotide is not any one of SEQ ID NOs: 3512-3525.

95. The pharmaceutical composition of claim 71 or 72, wherein the oligonucleotide is not any one of SEQ ID NOs: 3512-3525.
